United States Patent Application Publication US 2008/0066201 A1 - sequence listing, part 8

SEQ ID NO: 48959 - DNA, 246 bp, Glycine max
  unsure at all n locations
  Clone ID: LIB3139-085-P4-N4-D2
ttgagtttccttattgacaatcccaaacagtctacagtttttgatattctctggggaatctctcaagagggtggagttgcnnaatcctctgcatgatctggaattcgtgttttctttcgcttgttcgtttgtttaattcaataaaggaaattaggcatgaccctcttgttgagtatgctctgcctatctgaaaatttccacacctcttttaattgtcgtaatgatgtgtgaagtgtgtgttatttt

SEQ ID NO: 48960 - DNA, 320 bp, Glycine max
  Clone ID: LIB3139-085-P4-N4-D4
ctagtcgcgagcggccgcccttttttttttctttcaattttgagagaagggaagagaagaggaagaagacgaagaagaatccaaaagcaatcccatctgtgtgtttgcacatcagaagggagggctatcaaactcaaaggattgctctgaatcggtttagtcttcttcgtttttcttcaaattcctcgtgacagatctaatctaatcaggcttttgggggtgtttcagacattgcatgcatatgggttggtgtgttggatgctataaaaggcctacactgagtgctactgtggatgtgccatcgaaagggttggcaacac

SEQ ID NO: 48961 - DNA, 123 bp, Glycine max
  Clone ID: LIB3139-085-P4-N4-E12
aaaaaaacaaataaatatttaacaaataaaaaataaaaaaaaaggggactgtacaaaaaaacaggtggggagaaaaaccacctaaaaataataatgtgcttcctcctacttgagattttttaa

SEQ ID NO: 48962 - DNA, 203 bp, Glycine max
  Clone ID: LIB3139-085-P4-N4-E5
aaaaaaaaaaaaaaaaaataaaattaaaaaaaaaaaaaaaaaaaaaaaggggaagtgaaaaaaaaaaaggaggggaaggataaaaaaaaaaaaaaaaaaaaaaaagggccgccccccttataataaacttttcaacccggaaataaattccggaccagaacctccaagaaacacagatttcctattaagaaaacgaataaaac

SEQ ID NO: 48963 - DNA, 415 bp, Glycine max
  Clone ID: LIB3139-085-P4-N4-E7
ctagttctagatcgcgagcggccgccctttttttttttttttatattgaaacacactcattgcacataggaatgcgctttatttaagtgaataaaatattacatactagttcacaaatgcaaaaggacactcatcaaccagatatttgagactcttacagttctcaagaagtcgcgtcagcatagggttagtggcgttagaactcagaatttcattcttaacgccaaaaagaacagccaataaagctactggaaaaggatcaactctagtaagaaaaacaattttcttacctttcccaaggggctgtgcgaggtcctttgttgatgtctgaggagcgattgttaactgcagaactaatcccaagcagtggtgggtaaaccaccacgttcactaccacatgtaacatttacaacga

SEQ ID NO: 48964 - DNA, 333 bp, Glycine max
  unsure at all n locations
  Clone ID: LIB3139-085-P4-N4-G1
cttcgggatgggtgcaagacaatgtcagaaacttttggaatgtcaaattcaggtccattgctgtgggaaatgaagtgaggcgttgggactcatttgcaaagtttgtagtgcctgcaatgcaaaacatncaaagagcaatttctaatgctggcctttgaaaaccaaatcaaagtttccactgcccatgagtctggtgcattggcagaatcatacccttcatcaagaggctcatttaggtctgattatagaacatcatatcttgatggtgtcatcagatttttagtgaacaacaatgccccattattggntaatgtgtacccttacttagcttac

SEQ ID NO: 48965 - DNA, 76 bp, Glycine max
  Clone ID: LIB3139-085-P4-N4-G8
ggaatttgatggtttcttttgcacaagttattaatttgatcaaagttggtttcgatgttatcaggggaagagaaaa

SEQ ID NO: 48966 - DNA, 76 bp, Glycine max
  Clone ID: LIB3139-086-P1-N1-A2
ttgggggaggtggatatggtccatagcttactccataataatcgggcccatttaaaagattgcttagcacataaat

SEQ ID NO: 48967 - DNA, 379 bp, Glycine max
  Clone ID: LIB3139-086-P1-N1-A6
ggacacttctaaccttgttttctgactaagatttatacaagaaaaaagtccaatggtttagcaaatggaatgaaaagcgaaaatctagagtcagatggggtatcagttgaaactattgctgcaacaaggatccaaacagcattccgagcttataaggctagaaaatatttacaccgcttgagaggattcacaaaactgaagatccagactcaaggttcctctgctaaaaaacaagccgttaccactataacttatcttcattcatggagcaagatacaggctgagattagagctcgtcgtatatgtatggttacagaagacagaatcaggcggaagataatacattctcaactaaaacttgaggccaagattcatgacc

SEQ ID NO: 48968 - DNA, 236 bp, Glycine max
  Clone ID: LIB3139-086-P1-N1-B10
actacacatgttaatttacctgaatatgctggaaagagggcggcttattaaactctttactgctgacctgtacaacaaaattaccccaatttgacctccaccacaaaacataacatattcaaaaaactattctcaacactattgcataatgtaatttcctaacatcttatctccacggcatgttcaaatacaacttaatacacaaaatcaatcattgatcatcttataaatattcc

SEQ ID NO: 48969 - DNA, 271 bp, Glycine max
  unsure at all n locations
  Clone ID: LIB3139-086-P1-N1-B11
tgatattcaatttttctttttatcacacantgcctcacctgagcagctgtaatcaaaattcattcttactccatttcaacaattactcaattctttcctacttcttttctctactattctcttattctaaacaaaattactttctcttctgttacacacttctttaattcattattatttccatctcctattctattttctatacactctcctattttttatattacttcttctcactatcaaacctatttcttttctctcttacttcttc

SEQ ID NO: 48970 - DNA, 410 bp, Glycine max
  Clone ID: LIB3139-086-P1-N1-B4
ggttctaacctgcccggtgagtgagtgagagacggaaggtgcaaagccaccggcttctcttctcagagcttggctttgcttatcgattctctctcctctcatctttctcattcaaggtttgtaaaagatggccgatgctgaggatattcaaccccttgtttgtgacaatggaactggaatggtcaaggctggatttgctggtgatgatgctcccagggctgtctttcccagtattgttggccgacctcgacacactggtgttatggttgggatgggtcaaaaggatgcctatgttggtgatgaagcccaatcaaaaagaggtattcttactctcaagtatcccattgagcatggtatagtcagcaactgggatgacatggaaaagatctggcatcacacattttataatg

SEQ ID NO: 48971 - DNA, 297 bp, Glycine max
  Clone ID: LIB3139-086-P1-N1-B9
attgacaatcccaaacagtctacagtttttgatattctcttgggaatctctcaagattttgaaattgctggtaatactcttatgccagctttttctgttccacaggctactgccagatcttctgaaaatgcggaatcctctgcatgatctggaattcgtgttttctttcgcttgttcgtttgtttaattcaataaaggaaattaggcatgaccctcttgttgagtatgctctgcctatctgaaaatttccacacctcttttaattgtcgtaatgatgtgtgaagtgtgtgttatttt

SEQ ID NO: 48972 - DNA, 115 bp, Glycine max
  Clone ID: LIB3139-086-P1-N1-D12
accactaagtgtccacaatgttgtagtaacgcacaaaatgacagattgatgtaaatcttctgtttgcactttttatgaataataaatatcatgagttgtgatttggtcctgcatc

SEQ ID NO: 48973 - DNA, 408 bp, Glycine max
  unsure at all n locations
  Clone ID: LIB3139-086-P1-N1-D3
cttcgtttaaatctttttttttttttttgcgctttttgcaaacggaccatttaatttccaaagggatcaacaggtcgaaggagaaatggggctgacattcacgaagcttttcagccggcttttcgcgaagaaggaaatgcgaattctgatggttggtcttgatgctgctggtaagaccactatcctctacaagctcaagctcggagagatcgttactacaattcctaccattgggttcaatgttgagactgtggaatacaagaacattagcttcactgtttgggatgttggtggccaggacaagattcgtcccttgtggaggcactacttccagaacactcagggtcttaattttgttgtagacagcaatgatagggacaaggtntgtgaggccagaaatgagttaca

SEQ ID NO: 48974 - DNA, 372 bp, Glycine max
  Clone ID: LIB3139-086-P1-N1-D4
ccgttgcgcactccgttgaacagtacgcaccccacttggaagcggaatgcgacaccgacaagttcgtgttacctgggttacccgataacttggagatgacgcgcttgcagttgccggattggcttaggtctccgaatcagtacactgaactgatgaggacgattaagcagtcagagaaaaagagttacggttcactttttaatagtttttatgacctcgagagtgcttactacgagcattacaagagcatcatgggaactaagagttggggaattggaccggtttcgttgtgggcgaaccaggatgctcaagataaagctgcacgagggtatgctatagaagaagatgagaaagaagggtggcttaagttgc

SEQ ID NO: 48975 - DNA, 275 bp, Glycine max
  Clone ID: LIB3139-086-P1-N1-E6
cagtttttgatattcttttgggaatctctcaagattttgaaattgctggtaatactcttatgccagctttttctgttccacaggctactgccagatcttctgaaaatgcggaatcctctgcatgatctggaattcgtgttttctttcgcttgttcgtttgtttaattcaataaaggaaattaggcatgaccctcttgttgagtatgctctgcctatctgaaaatttccacacctcttttaattgtcgtaatgatgtgtgaagtgtgtgttatttt

SEQ ID NO: 48976 - DNA, 313 bp, Glycine max
  unsure at all n locations
  Clone ID: LIB3139-086-P1-N1-F3
gggtttggtggctttcatttgttttcttctttaaatctgatcctgaggccggttaatgctgccatacctncagaggtttactgggaaaggatgctttcaaatcccccaatgcccaaagcaatcatagactntctaaaccttgatcaacttcctctttggtatggtgctaaggaaacccaatctacagatcaaatattcctgtatgatgctaagaaaaacccatcaacagatcaagttccttctatcttttatggggataagaaaacccaatcaacagatgaagtttctcctatcttttatggtgctaagaaaa

SEQ ID NO: 48977 - DNA, 236 bp, Glycine max
  Clone ID: LIB3139-086-P1-N1-F6
ctaacactcatatatttcttttttggcactcctttgctaggtgaggggcgtttttgttctcttcactcttggtcttgcgagagaaagccatgccagagacgaagatttttggcatgctgtttggccaaacactcccattccaagttcattgcgagatcttctaaagcctggccctgcaagtgttgaaatccatgatcaccctatgcaaattgaagaaacacagtacccgaaaacct

SEQ ID NO: 48978 - DNA, 366 bp, Glycine max
  Clone ID: LIB3139-086-P1-N1-G6
ggagctaacacaggggtcctttaataaagccctaatcgctgagttcatagcaacccttctcttcctttatgtcaccgtgctcaccattattggctacaaaaggcagactgatgccacgctaggtggcaccgagtgtgatggggttggcattttgggcatcgcttgggcctttggtggcatgatcttcatccttgtttactgcaccgccggtatttcaggaggacacataaacccggcggtgacattcgggctgttcctaggacgcaaggtttcgttgataaaggcgttgttgtacatggtagcacagtgtgccggtgctatctgtggcactggattggccaggggttccaaaaatcatactacaac

SEQ ID NO: 48979 - DNA, 129 bp, Glycine max
  Clone ID: LIB3139-086-P1-N1-G7
cagctcttacacacttttttttttaaataaacctcataccggggccgggaggcttaccagctttccttaatgtcacccatcttacaactagtcgctacaaagggcatacttgttccctgctagaaagca

SEQ ID NO: 48980 - DNA, 243 bp, Glycine max
  Clone ID: LIB3139-086-P1-N1-H11
gcgagcggccgtcctttttttttttttttttttttttttggcgggtttttttttttatatttaaacacactcattgcacatagtaatgcgctttatttaagtgaataaaatattacatactatttcacaaattcaaaaggacactcattaaccaaatatttgagactttttcagttttcaagaaattttgttagcataaggttagtggcgctagaactcataattttatttttaaccccaaaa

SEQ ID NO: 48981 - DNA, 153 bp, Glycine max
  Clone ID: LIB3139-086-P1-N1-H8
ctccactctatctaacttataaatggaaaagaatgtatctggacgggtcattttcatatactttcctccctctcacgatcaacaataatcattacatactcattatggttccagtaaaggtaagcttaccattacacttcttcaagactgcat

SEQ ID NO: 48982 - DNA, 190 bp, Glycine max
  Clone ID: LIB3139-087-P1-N1-B3
ctgtaatattgttcctggtgattctgatatcatcaagacactacctggcgaacagtaaagtattatttgaagttccttgctggatattttctgtttttagttgattcaagacattgttgaaagaatatctgatctaagttgtacactttggtgtaaggtgcatggattttgggtattctagctgagcatc

SEQ ID NO: 48983 - DNA, 247 bp, Glycine max
  Clone ID: LIB3139-087-P1-N1-B8
gttctagatcgcgagcggccaccctttttttttttttttttatatttaaacacactcattgcacatagtaatgcgctttatttaagtgaataaaatattacatactagttcacaaatgcaaaagaacactcatcaaccagatatttgagactcttacagttttcaagaagtcgcgtcagcataggattagtggcgttagaactcagaatttccggctcgagctcgagccgctagttctagatcgcga

SEQ ID NO: 48984 - DNA, 204 bp, Glycine max
  Clone ID: LIB3139-087-P1-N1-C1
ctcgagccgatctagaacaagtgaataaaaaaaaaaaataaaaatgtaaaatatagaaagcaaaaaatgagagggggtttttatagtgttgcaaaaaaacatgtataagtggataattcttatccatgaaattcaagagcagaaagtttgtcccatgcacatgttacagctaattgttaaaaaagaaagcagatacaaaagggg

SEQ ID NO: 48985 - DNA, 308 bp, Glycine max
  unsure at all n locations
  Clone ID: LIB3139-087-P1-N1-C2
gctgtgactgttagcatagtaggagttgttggcaatatctatagccttgagagtaagtcttagtccacgatttggtttctttttcacaggaatcatgtgctaaaatttagtatacaacatttgttcattggctctgctgcaatgtaattcaaacagcagaggattgggggtgacaggattgttctgtagtatgggataagtatttttgccccagctatgatatatatgatatgagatgcacataaactttcatttgaggaatgatgaattgatgaccgattgattcanannacataaagttgatagtt

SEQ ID NO: 48986 - DNA, 56 bp, Glycine max
  Clone ID: LIB3139-087-P1-N1-E1
aaaaaaaattatttaaaaaaaaaaaaataaaaaaaaggaaaaaaaaaaaaaaaaaa

SEQ ID NO: 48987 - DNA, 250 bp, Glycine max
  Clone ID: LIB3139-087-P1-N1-F8
tgaaataatttttaaaaaaaaaaaaaaaaaaaaaaaaggggaaatttaaaaaaaaaataaggattttcattctaattttttttttaatttatccctctttttatatcatccttcactaagatattgtacatatttttttttttttttttttttttgggggggtgcccccccttttttttttttttcccccgtatttttttttcgccctttcctttggggcccaccctttttttttttttgtgattttttt

SEQ ID NO: 48988 - DNA, 363 bp, Glycine max
  Clone ID: LIB3139-087-P1-N1-G10
gccgccctttttttttttttttttaatattgagaacttgcatgatcacatttatgatttattataaatatatacactacctaaacagataaaattacctctatttccactccacccacagatttgatgaaaactgtccctagctagttatactactactccatggagcttcccagcttgattacctcaaaattcaatactaagctgcccaataaagaaaaataaaatcttaaaattttacagaaacagctaccgggaaggcttaaaataccccagagcagcacacaacttataaagagatagctagcttataacatgacacaaacacacacttataatcttaacgctgccgcaaagtgccaac

SEQ ID NO: 48989 - DNA, 347 bp, Glycine max
  Clone ID: LIB3139-087-P1-N1-G4
ggccgccctttttttttttttttcaatcatagttgtcaagaatttcaataccactctagtagtttggcaaactgcattatcaaaatttaaccgctcaataaaatttgaaactacttacattgaaggaggattgaatctgaagagaaaagtgtaacacgatttcttttttacacacacaaaaaaaaaaggagagagagattcacaggttgtggcttttacttacacatcctagtatacatttctatacccgtgctatacaacaacatatcgcactaaagacttttcaagtgcgcctttatatgcatataagaatgttctagatttaagaaaattttatttttttcaca

SEQ ID NO: 48990 - DNA, 184 bp, Glycine max
  Clone ID: LIB3139-087-P1-N1-G6
cagatcttctgaaaatgcggaatcctctgcatgatctggaattcgtgttttctttcgcttgttcgtttgtttaattcaataaaggaaattaggcatgaccctcttgttgagtatgctctgcctatctgaaaatttccacacctcttttaattgtcgtaatgatgtgtgaagtgtgtgttatttt

SEQ ID NO: 48991 - DNA, 408 bp, Glycine max
  Clone ID: LIB3139-088-P1-N1-A7
aggaagagggatagtctgggtgaagaagttgtgaaaccatatactcctacaacattggatactgatgttggatactttgaattggttgtgaagatgtatccacaaggacggatgtctcatcactttagggagatacgtgaaggtgattacatggctgtgaagggaccaaagggacgttttaagtaccagcccaaccaagtaagagctttgggtatgattgctggtggcactggcatcaccccaatgtttcaagttacaagagctatattagaaaaccaacaggacaaaaccaacataaatttgatatatgccaatgtcacatttgatgacattcttttgaaggaagagctggatgcctttgccattaagttccctaatcaattcaaagtttactatgttctaaatcag

SEQ ID NO: 48992 - DNA, 171 bp, Glycine max
  Clone ID: LIB3139-088-P1-N1-D3
tagttctagatcagcgagcggccgccctttttttttttttttttttttttttttttttttttacataaaggaaattaggcatgaccctcttgttgagtatgctctgcctatctgaaaatttccacacctcttttaattgtcgtaatgatgtgtgaagtgtgtgttattttt

SEQ ID NO: 48993 - DNA, 115 bp, Glycine max
  Clone ID: LIB3139-088-P1-N1-F10
gaactgtaagagtctcaaatatctggttgatgagtgtccttttgcatttgtgaactagtatgtaatattttattcacttaaataaagcgcattactatgtgcaatgagtgtgttt

SEQ ID NO: 48994 - DNA, 99 bp, Glycine max
  Clone ID: LIB3139-088-P1-N1-H1
aaaaaaaatatattaataacacaaaaaaaaaaaaaccaaaatgctaaaattaaataaaacacaaaaaaaataaaaaaaaatcaaaaaataataacaatt

SEQ ID NO: 48995 - DNA, 405 bp, Glycine max
  Clone ID: LIB3139-088-P1-N1-H10
gcgagcggtcgcccttttttttttttttttgggtgcaacacgtttttgttggtatttttttccatacaattagattggtagaacatgaagggaaagaaatcggttaacattaaatggaagaaaatgagtaatatggggtgattcatttacagagccgccaagagccaaaaagctaccaaatctagcttttattaaaattcgatgaatgtctaaaggaaaccaaaagggtaaaagaaaaacgctaaactatgccttttttttttttttctcttcttttggtttgataaaaaatacagctttggagtaactgttgattccctgcaaaagaggggatggggggttagtgctccttgcggagataaaacaatactcttgagtcctgtcatctgattttcatttcatttg

SEQ ID NO: 48996 - DNA, 366 bp, Glycine max
  Clone ID: LIB3139-088-P1-N1-H11
tcgccccgtacctaagaatgcagctcgagcaaagccaatgactatgtcacataatccgctccccagttcatatggatgtggtgggagacttttgtatggctgcccatctaactagccagataccattgctaatgcatgggcaaacaaccacgttgcacatgttgctagagtttcaagtcacaccaccctgaggcatgccattctggaaggctatacatagaaataacttaccttatctcatttttgccatattggtggcgtgcattacagtgtgcaagaaggtggtttgatgaccgtgatgtcaaccatttggctaacatggggaagtatgtgtcagcaatggttgcagcaggagctagagtcaca

SEQ ID NO: 48997 - DNA, 104 bp, Glycine max
  Clone ID: LIB3139-088-P1-N1-H3
aaaaaaaaaaaattaaaaaaaaaaaaaaaaaaaaaaaaaaaaaaaaaaaaaaaaaaaaaaaaaaaaaaaaaaaaaaaaaaaaaaaaaaaaaaaaaaaaaaaggg

SEQ ID NO: 48998 - DNA, 110 bp, Glycine max
  Clone ID: LIB3139-088-P1-N1-H4
aaaaattattatttttattgaaaaaaaaaaaaaaaaaaaaaaaaaaaaaaaaaaaataaaaaaaaaaaaaaaaaaaaaaaaagggcgccccccacctattatgccagttc

SEQ ID NO: 48999 - DNA, 223 bp, Glycine max
  unsure at all n locations
  Clone ID: LIB3139-088-P1-N1-H6
accaatttttgtgaattgtctttatcctgtaagtcaattacctccagaagctgttgttgtaaatgttacatgtggtggtggacgtggtattatttatatcactgggnggtctgccnccccaatgcattatgttcaggttacaatcgttcggtttatttcctctcttgtttgtgttccctgttcttcttttgttttttatccacttaacccttttctgtttaat

SEQ ID NO: 49000 - DNA, 72 bp, Glycine max
  Clone ID: LIB3139-088-P1-N1-H9
aaaaaaattaataaaaaaaaaaaaaaaaaaaaaaaaaaaaaaaaaaaaaaaaaaaaaaaaaaaaaaaaaaaa

SEQ ID NO: 49001 - DNA, 313 bp, Glycine max
  Clone ID: LIB3139-089-P1-N1-A7
aggtcgaggatattcctctggtgaagctatggaacccaaggcctggaagtttccaaggtcggatttgcatggattggcctaatgggagtgttcatcgatcctgcatcctaagaggcaggcatttatctgatcaaactcccatacaccaaacgggtaacttggatggattatgcagaagattatggatcacgagccactcaaatgatggttctataggttatcagggacttttcttgagatcaaatgcttattgccacaaaatttgacattctcaaaatggagaattgtaatgcaatactgaacgaattccctg

SEQ ID NO: 49002 - DNA, 166 bp, Glycine max
  Clone ID: LIB3139-089-P1-N1-A8
gactctcaaggagcatgtgatcaagccggtgatcccggagaagtaccttgatgagaagaccatttttcacttggacccctatggccgttatgtaataggaggtcctgacggagatgctggtctaacggtgcggaggatcatcatcgatacttacatgggatggtgt

SEQ ID NO: 49003 - DNA, 130 bp, Glycine max
  Clone ID: LIB3139-089-P1-N1-B2
ctcgagccggttctagatcgcgagcggccgcccgcgatcgagaactagtctttcagaacatatatattttatatgatgaaacaaaaaaaaatgttctctcaaaaaaaaaaataaaaaaagagatgacatt

SEQ ID NO: 49004 - DNA, 238 bp, Glycine max
  Clone ID: LIB3139-089-P1-N1-D2
tggatatcttataaaaaagttagctctatatgcttaatagagaatgtgtttgtgaaggtgttctgtttgtaagaactggtggaaggatggtttgttagaaagagcgtgatgccgctctgccaaaagggggaaaagttattatcatagtcaaaggtatggtggaagcatatctttcatgttgtataattaagaatgtttgtagaaaatgttgtgtttagaagaggataagtatatttgg

SEQ ID NO: 49005 - DNA, 338 bp, Glycine max
  unsure at all n locations
  Clone ID: LIB3139-089-P1-N1-F7
cgattcggctcgagggctcgaggctcgtgcctctagggttatcatatctccatttccatttcctctctctcagtttccaagaatcttaagctatgggaaagtcttacccaaccgtgagcgctgattaccagaaggccgttgagaaggcgaagaagaagctcagaggcttcatcgctgagaagagatgcgctcctctaatgctccgtttggcatggcactctgctggaacttacgacgtgagctcgaagaccggtggtcccttcggaaccataaagcacccctncgaacttgctcacggcgctaacaacggtcttgacatcgctgttaggcttttggag

SEQ ID NO: 49006 - DNA, 220 bp, Glycine max
  Clone ID: LIB3139-089-P1-N1-G11
gacaagttgaatgagatgttggaggcaaaagtgaagccgtacatccaggatatagacaacgcagttcttcctgagcctattttattaaagccacaaaatcaggaaaagagacaacggcggaggtggttcttcttttgacaacatggataaagttactatatgcttgaacatgcttgtttgtagtcctaattttttgttataaatctgtaactatttattc

SEQ ID NO: 49007 - DNA, 275 bp, Glycine max
  Clone ID: LIB3139-089-P1-N1-G3
ggcttgagctttaacgcgccaaattacaatcaccatgtcctcttcctcttcctccttcttccccgcccatatcaccaccgaccaagaattctccctcatcgttgccgccctcaccaacgtcgtctccggctctacctccagctcctccgtccctgaattccgcttcccgcactcctccccgcctctttcttccgccagccttatgccgccacccccgcctagcatccacacgtgtcgcgagtgcaacatcgcaggatgcctgggatgcaactttt

SEQ ID NO: 49008 - DNA, 576 bp, Glycine max
  unsure at all n locations
  Clone ID: LIB3139-089-P1-N1-G3.F2
ggcttgagctttaacgcgccaaattacaatcaccatgtcctcttcctcttcctccttcttccccgcccatatcaccaccgaccaagaattctccctcatcgttgccgccctcaccaacgtcgtctccggctctacctccagctcctccgtccctgaattccgcttcccgcactcctccccgcctctttcttccgccagccttatgccgccacccccgcctagcatccacacgtgtcgcgagtgcaacatcgcaggatgcctgggatgcaactttttccccgaggaacaaaggaagaaatacagaggagttaggcagaggccttcgggaaagtgggccgccgagattcgcgatcgtcatcgttcggcccgggtctggctcggtacattcgaaaccgccgaggacgccgcccgggcctatgacaaggcctcgttcgagttacgcggcccacgggccaagctcaatttccccttggtcgacgagtcgctcactctccagccggagatggctgcaacagaagagcagattaacaacgagggatatctcaatcaaggcatggngaatggactcgcacgaat

SEQ ID NO: 49009 - DNA, 394 bp, Glycine max
  Clone ID: LIB3139-089-P1-N1-H10
gatagtttcaccccctttctccaacttccattaacattctcatcttctccgtgggcgctctctgtatcacctccgtcggcactgttcttcgatctaaagttgttcaaccacagcagtggcagattgacagtgcaaccctcctattgtttcttcttttgagtaagttaagttcactggttcaagtattttggcacccccaaggtgggacctaaaggattaggatttccatggagactgacagacctgacggccggactcctaatcaactgagacccctggcctactcgtgttccatcctgcatcgcgcccatggttcggccagttgggctcaaggagaaaccaaagtgcttgctgctgtttatggacccaaagccggaaccaagagaatgaaaac

SEQ ID NO: 49010 - DNA, 92 bp, Glycine max
  Clone ID: LIB3139-090-P1-N1-A3
ggggtattttaaaaaaaaaaacacacacttcacacatcattacgacaattaaaagaggtgtggaaatgatgtgtgaagtgtgtgttattttt

SEQ ID NO: 49011 - DNA, 69 bp, Glycine max
  Clone ID: LIB3139-090-P1-N1-A4
ggctataaccactatgcttatactatggagtttcgatgccttacattggttatatatatcaatataatg

SEQ ID NO: 49012 - DNA, 315 bp, Glycine max
  Clone ID: LIB3139-090-P1-N1-C11.R1
ataaaacaactactctttagtctttacatttatatttatagctaagctattgaataatcgattatctaatgacaagcactacatattataaaagagatagtgagtggttctaaaaagatactctagaatctaaatgataatctttggatgttcctaaattgtcataattcatccatgctccatgtgctacttgcaaattctcttgtttagcctattggtttctaatgtttggcaatcaaacactgggagttccagattcccagcaaccattgtggttgtcaggttcaaggcatccctgtcataggaattgttatc

SEQ ID NO: 49013 - DNA, 508 bp, Glycine max
  Clone ID: LIB3139-090-P1-N1-C11.R2
ataaaacaactactctttagtctttacatttatatttatagctaagctattgaataatcgattatctaatgacaagcactacatattataaaagagatagtgagtggttctaaaaagatactctagaatctaaatgataatctttgtatgttcctaaattgtcataattcatccatgctccatgtgctacttgcaaattccttgtttagcctattggtttctaatgtttggcaatcaaacactgggagttccagattcccagcaaccattgtggttgtcaggttcaaggcatccctgtcataggaattgttatctatgctatagccatcatataaacacatgccaaagtcacagttatctaaggcctgaaattgactagtagtgtatccaaaaggctgactcatatttgggatatttgctgattctgaagaggaaatgcatgaactattgtggtgttcagagtctgagttctgctcatgctgattcaaatgattgagatctccatggc

SEQ ID NO: 49014 - DNA, 105 bp, Glycine max
  Clone ID: LIB3139-090-P1-N1-C2
ggtctctttcttcatagcatttggaaaaattggctgatgacaccattcaaatttgaggctttttccccacaagctggtgccaattgggagagatcaaggaaaaag

SEQ ID NO: 49015 - DNA, 379 bp, Glycine max
  unsure at all n locations
  Clone ID: LIB3139-090-P1-N1-C7
ggcaaggtgttcaggttacaattgattgggttatttcctcttaggaatggggtcccaggacctattgggttttaaatccacaaaatccttttgggcctaataggtggatggggaaactggacttttccccaaggcactttccgaagtggtaaaagaatgcctttntctatagggggaggagctggtgcaaagaatggtattcttatgaatatgccaaatgcttgtctttcaatgtggagatattttgttggggatcttcgttttgaaggttctaagatgacttcttcctacattaaatggacagtctttttctttatagcatttggaaatttggctgatgacacccatcaattttgggctttttcccacaagctggtgc

SEQ ID NO: 49016 - DNA, 58 bp, Glycine max
  Clone ID: LIB3139-090-P1-N1-E1
gggttctttctttccccaatttgtgagtgttactattgaatcgattggattgacatgg

SEQ ID NO: 49017 - DNA, 156 bp, Glycine max
  Clone ID: LIB3139-090-P1-N1-E12
ggtttatagtatttgtttgtacacaagtcgcaactactaaaatgggtgcgatccacatggaagaaaaagatgggctgccggcgactacagagctagcagacccggtgagctatgaacagaccggttccggcagggcgactcagcttgatatataca

SEQ ID NO: 49018 - DNA, 353 bp, Glycine max
  Clone ID: LIB3139-090-P1-N1-E2
tggaattgcataactcatgcatgaataaaaacaagttgagaagatcgatgtagtgaaggaatggtctttcgtttctctttcatcaagttgttgtatacccaaaggccaaggacaacataattgtactatgactctatgagggccaatattggtatacttgttcaaactacataattttctgatctgccttgtatacaaagtcatgcaatattgccatagcatctttttaattattttctctgtttttctttgtctattgcatgtgtggttctgtgtgcatgtcagcctgtgtaagctttcccgtgagtacgttgggaaatgtacaagttagcgaagctttagatttttcttag

SEQ ID NO: 49019 - DNA, 423 bp, Glycine max
  Clone ID: LIB3139-090-P1-N1-E3
cagtcttgatgatgttggaactcctaaggggcaatttaaacaaatttggttccatctgaacctggacctcattggattgaggatctattctttgtctcaatctggtatcaaatttgtttaaattgtctcttgatgatgttgaaactcctaaaggttctatgttggatcttaaaaattctcaatctaaaattgcactttccaagaacacaattggaggaaccattctgcgtagtgatctaattgcaaaatttttgacagaaggcaattttagagcaagtgttgatttgcagcgcactcatcgtattaaaggaatgattaaaatggtggccacaattggtattcctgagaatacaggtatagcattggcctgtgctatgaatagttcttttagggggcgcgccagttctgatatttacaccatct

SEQ ID NO: 49020 - DNA, 180 bp, Glycine max
  Clone ID: LIB3139-090-P1-N1-F2
aattcaataaaggaaattgggcatgaccctcttgttgagtatgctctgcctatttgaaaatttccacacctcttttaattgtcgtaatgacgtgtgaagtgtgtgttattttaaaaaaaaaaaaaaaaaaaaaaataaaaaaaaaaaataaaattaaaataaaaataatatataataatt

SEQ ID NO: 49021 - DNA, 373 bp, Glycine max
  unsure at all n locations
  Clone ID: LIB3139-090-P1-N1-G10
ggnngagaagacgaaatcagaacagcncaaccggcaaacacaacgccaaagcaggaacacagccacaaagcgaaaagagggagacacgcacaaccaagagggacagagaaggagaaggagnggagcgaccgcacgaaaaaaagacaaagggaagccaggacaaagaagaacaggagcgggggagacaagaccaaacaagaagagaggaagcgaggaaacacgagaaacggcaggaaccaaaagggaggacaaaaggggaaacggcagaaacagaggaagagacgaaggaaacaggggaagcagagcaaggcgaaaaacggaagaagacagagggacaacaaacaagagaggaagaaaaaaaaaaaaaaaggga

SEQ ID NO: 49022 - DNA, 354 bp, Glycine max
  Clone ID: LIB3139-090-P1-N1-H11
ctagtttagcttcttttttttaatctttctcatgggaaagtttgccctatctaatatccttttggtccttctcttgaacttgagcactttgctcaatgttcttgcttgttcctatagcccttacccttctcccaagccttcaaataaagcctttccgttgtgaaaccaccggttcacaaaccaccaataccatgttcaccacccaagtcatctccaaaaccaccccatgttcacccttcttatgtttcaaaaccttctcacttaccttaaaccaccagttcattcacattcaccctatgttccaaaaccttattcaaagccttcagtgcattcccattcaccttatgttccaaa

SEQ ID NO: 49023 - DNA, 336 bp, Glycine max
  unsure at all n locations
  Clone ID: LIB3139-090-P1-N1-H4
caaacacaacacaacacagctttccgngnnncannnncncncacacacaaaccccccgcgggcgcaancaccccccaagaggaagaacgacccaannncgccanccgcngaaaaaaaaaaacgaaaaaaacnnncgccacgggaacccagacggcgcgaccccacgactgctnggtagaacgaatcacggctcctccggctgactttacccggcggaggagttccgggcattacttgtattattattactacaacaacaacaacaacccatgtcgccacttccaggtcgtgccggaagcctgttagccgaccccaccaaaggaaacgggctggttc

SEQ ID NO: 49024 - DNA, 185 bp, Glycine max
  Clone ID: LIB3139-091-P1-N1-B9
agcaatcttttgtctgagatgtgaggcgaatcatgtatgtatataaatattgtaattacagttcatagtggcaacagaattaggttcttctgctgctctttctgaacccccaccaaaattttgcagagagatatgtgtaaatatatttattcttgttacataataaagaaacttatattatgcct

SEQ ID NO: 49025 - DNA, 254 bp, Glycine max
  unsure at all n locations
  Clone ID: LIB3139-091-P1-N1-D1
aatattttgtggtgcttcatattatttacaaatatttagagggatcaagtttcttaacctgtttgtattgcttcaacaaaatggtaagaggtctctgtcattattgatttattttctgactcccattacgttnagaaaaaaaaaaaaaaaaaaaaaaaaaaaaaaaaaaaaaaaaaaaaaaaaataaaaaaaaaaaaattaaaaaaaaaaaaaaaataaaaattaaaaattataaaaaaaatatatanaatggg

SEQ ID NO: 49026 - DNA, 405 bp, Glycine max
  Clone ID: LIB3139-091-P1-N1-E5
gaggtcgtttttgggaggacctggttcttgccttggtgggtgaccaattggattatggggataacatatgtggtgcagtacttagcattcgattcaatgaggatatattgagtgtctggaatcgcaatgcttcggaccatcaggctgtaatggctctgagagattcaatcaaacgtcacttaaagcttccacatagctatgttatggagtacaagccccatgatgcctctctgcgagacaattcatcttacaggaacacttggttgagaggctagagattcaattgtgttcttgccaaagtccccgccgtggaagctacattgcatattggtgcagctttcactcagccagttaatcattggcttcggtctagtgatagtgatggtgctgggtgttccaggactg

SEQ ID NO: 49027 - DNA, 165 bp, Glycine max
  Clone ID: LIB3139-091-P1-N1-H5
atctcgaggatgtgagttttttattttccacaaaggccaagtcacgatctgacattggggaagtcaccatgaaaatggatcaaaactgtatagaattgggaaaacgtcgttcaaatcaaatagatcaaattgcagataggtgaagctcgattttacagtagaagg

SEQ ID NO: 49028 - DNA, 77 bp, Glycine max
  Clone ID: LIB3139-092-P1-N1-B11
gctctgcctatttgaaaatttacacacttcacacatcattacgataattaaaagaggtgtgaagtgtgtgttatttt

SEQ ID NO: 49029 - DNA, 266 bp, Glycine max
  Clone ID: LIB3139-092-P1-N1-B12
ccaataaatttttgtacttttctccaaaccaggctccagggcgagcgctgaaactgcttgggatactacaacttaggtaaacaatgatcatggagagaatggcggatatggacatagtcaaacgtgcattcaagactttcctgaacaaatttaatcttccaaaaacttttggtgaaaacaaaacttttgtaaaaggaaaggttccttcaaaggtgacagatccaaggtatccaacatttataaccttgataaaggaagatggacag

SEQ ID NO: 49030 - DNA, 455 bp, Glycine max
  Clone ID: LIB3139-092-P1-N1-C3
ggtggtaacggcaccctgggccgaatttttgacgagctacaaggaattaactgggacttcttggactaatttgtacttcattagcttctacttaattactgttttgctgctttggaacttgattattgcttttgtcttggaggcattctttgccgaaatggaacttgagtcatcagaaacttgtgaaggaaatggcaaggaagttgaaggagataaatatcgaaagcgatctattggcacaaaaacacgaaaccagagggttgatgctcttcttcatcatatgctgagtgctgaattgtgtcaaaatgagccttccagtacacaaacttcataaatcattttgcagaatgcacgaaggagcccacctcattctgatctttcatgtggtttgcatctcgtgtgggtgtaccgtacggtagacaagagagcatgcaaacatatagtaatttgcattt

SEQ ID NO: 49031 - DNA, 169 bp, Glycine max
  Clone ID: LIB3139-092-P1-N1-C4
gaaaggttccaattaatttttggcccttgtccttaacctgggttccaggccaccctgttcctgtttggcttcctccatgggggaattctttgtttttggagaaattgggggttaaggccttagtcaaccagcctttcaggcctttccagaccaatttcaatcagccaaa

SEQ ID NO: 49032 - DNA, 52 bp, Glycine max
  Clone ID: LIB3139-092-P1-N1-E3
cccactctcttcttcttgctattccttcctcgtcatggagtcccgagtgctg

SEQ ID NO: 49033 - DNA, 130 bp, Glycine max
  Clone ID: LIB3139-092-P1-N1-F10
aaaaaaaaaaaaaaaatttaaaaaaaaaaaaaaaaaaaaaaaaaagggaaaaaaaaaaaaaaaaaaaaaaaaaaaaaaaaaaaaaaaaaaaaaaaaaaaaaaaaaaaaaaagggggggccccccattatg

SEQ ID NO: 49034 - DNA, 325 bp, Glycine max
  unsure at all n locations
  Clone ID: LIB3139-092-P1-N1-F3
aaataccaagatcaatgctatttttactgtcattatttccaactttgtcttaccttgttaatgatcatatacaaagaatgatatgattgcaagggacagggtaatggacttcattaggctcttgtttgttataaattagattagaagcggcagattgatgtatagacctgagaaggtatggcattacctgatttttttcctttactgaaacaaaaatgtatcctctcttgtgctggtgaaaatgatgtacatacatttcaggacaatttagtaatagatgatggatatttgctctggtaaaaaaaaaaaaaaaaaaatnnatnng

SEQ ID NO: 49035 - DNA, 420 bp, Glycine max
  Clone ID: LIB3139-092-P1-N1-H12
cagattattatcctttttgggaattgatcttcccaatagaggtatgtggtcctaataatggttagaaatgtggagttctgagtgggcaaatcaaacttcatggcactcgagttttcttatagacaatcccaaacagtctacagttttgatgttctcagggaatatctaagatttgaaatcgctggtgaactcttatgccagctttttctgttccacaggctactgccagagcttctgaaaatgcggaatcctctgcatgatctggaatttgtgtgttctttcgttaggtcggttgtttaattcaatctatgaaattagacatgaccctattgtagagtatgctctgactatttgcaaatttccacacctattttaattgtcgtaatgctgagtgaagtgtgtgttttgttattaaatatt

SEQ ID NO: 49036 - DNA, 422 bp, Glycine max
  Clone ID: LIB3139-092-P1-N1-H5
agctggtggacatcttgtgaccactacggattgttacaggaagactagaatattcattgagacttttcttccaaagatggggatcacgaccactgtaattgatccagcagatgttggagccttggaatctgcattggagcagcacaatgtgtctctattcttcactgagtcgcctaccaatccattcctgagatgtgttgacattaagctggtttcagagctttgccacaagaaggggactttgctctgtattgatggtacatttgcaacaccattgaaccagaaggcccttgcccttggcgctgatctgattctgcactccttaacaaaatacatgggtggacatcatgatgcccttggtgggtgcataagtggttcaactaaggtggtttcgcaaattcggactttgcaccatgttttgg

SEQ ID NO: 49037 - DNA, 64 bp, Glycine max
  Clone ID: LIB3139-093-P1-N1-G11
aaaaaaaaaaaaaaaaaaaaaaaaaaaaaaaaaaaaaaaaaaaaaaaaaaaaaaaaaaaaaaaa

SEQ ID NO: 49038 - DNA, 335 bp, Glycine max
  Clone ID: LIB3139-093-P1-N1-H4
agccgccctttttttttttttttttttttttttttttttttagggttgatttaattacttgattaaaacttacatatatggatttgaatatatagtacgtggttttcgagcttggtgtttctagatattataataatatgatggggaaaaacaaaactaaggctctctttttcttttttgtcgctttgttgttgagcaaagagagcactgtcactttgggcctttttttacttgataattttagatggagcttgagctttgttactattgtttcaatttaagtttcttgaatacaggtggaggtattgatctggatttccatttttttttatgtt

SEQ ID NO: 49039 - DNA, 202 bp, Glycine max
  Clone ID: LIB3139-094-P1-N1-B7
ggcaatccattttatcttatttctcaaggttggaatgacttatgaaatatgacctcgatttccagtagtttcactgtccatacataaaaataaagaaatatgtactttgcttgaattttgtatcttttccaccaaatcatgcaagctataagttatgttcaagaaaaagtcttcgcttcaaaaaatatatatatatttttta

SEQ ID NO: 49040 - DNA, 232 bp, Glycine max
  Clone ID: LIB3139-094-P1-N1-C12.R1
ttatttttattttttttttttttttaatgaattatttgtgattttaatgtgtttgtgtatgtagagaaaaagaaaaagaaagaagggtttaaaataattgacaagaatgggattgaaagtaaagtaaggtaaaagaaaattgtagaaaaattagagtaaaaaaaaaaggaagaaaaaagaataaattagggataagaagaatgattataaggaaaagagaaggtattataag

SEQ ID NO: 49041 - DNA, 435 bp, Glycine max
  Clone ID: LIB3139-094-P1-N1-C6
cctttccagactcttcttcttttaccaccaccaaacaccgggcgacgaccaccacctaacccacaatgctccggccagccgtcctccgaccgctgacgcgcgccgcgacggcaccccgcttcgccgctgtgcgcgcctacgccagcaagcagccgtcgccatccgtcgaaagcgtgccggccaacaaccccaaccccaagaccccgccgcccaacgtctccgagaccaacgccgtgccgacttcctccgagggatccttcgaccaggtgctgcaggagagcgtcgaggccgctgaggccatgcgcaccgtccaggcgcccaaccgtcagggaacgtggagccgcagccaaaacccgcgcgagcgcgccatggcgggcccgcggtttgagcagacgatcatggcggatcagccttgtccctacgccgccatcgagc

SEQ ID NO: 49042 - DNA, 433 bp, Glycine max
  Clone ID: LIB3139-094-P1-N1-D6
gggagaataataaacacgtagacgttgaattgaacagaacacagacgtagctgaatcaaagacgaagaggagagagtcctgaaattacacacaaacacaacaatcttctcctttctcttcacacattccatatgcaagcatgattctatttaatacccaaactacgtgaaacactagacacacaaattgggtcttggaggaatcttccatcatgtctggttacagccctatgttcctcgtaatcctcagtgtcgtcgtaggtttcacgattcggtggttcctgttcaaaacgggattgatacacaccataagaatacgcttcccaagggtcgtggattggttccacgtgtaccagttcctcaaagtccccgaatttaacgaaaccaatatgcagccgaataaccttcaccgcaaagtttctctctatttgcat

SEQ ID NO: 49043 - DNA, 235 bp, Glycine max
  Clone ID: LIB3139-094-P1-N1-D7
tgaaaaaaaaaatttaaattaaaaaaaaaaaaaaaaaaaaaggaaaaaaaaaaaaaaaaaaaaaaaaaaaaaaaaaaaaaaaaaaataaaaaaaaaaaaaaaaaaaaaaaaaaaaaaaaaaaaaacaaaaaaaatacattaaaaaaaagggggggcctccccccatatggtgttccttcccccaataaataaatttttcgggctcctgggggggttccaattttctttaaaaggg

SEQ ID NO: 49044 - DNA, 399 bp, Glycine max
  Clone ID: LIB3139-094-P1-N1-E3
ctcgagccgaatacggattgaggaatctcaaagacagagacgactgccattaacgaagagtaacaaccaaactaactagttggccacaaagaacttgtttacaaatgtctatcgtgagggcgcatcactctataggtatatactcttgacctgggtgtgcgcgctagagcatgagagcttgaaggagctacgagagttgacggaaaaacacccttggaacctgatggctacaccacctgacgaaggacagcttctaggcatgctgcgtaagcttatcaatgccaagaacaccatggaaataggcgtgttcactggttactccttgctttccactagccttgccctcccttttgacggaaagatcttagctatggatgttaaccgggaagattatgaatt

SEQ ID NO: 49045 - DNA, 262 bp, Glycine max
  Clone ID: LIB3139-094-P1-N1-E7
ctcttgggaatctctcaagattttgaaattgctggtaatactcttatgccagcttttttctgttccacaggctactgccagatcttctgaaaatgcggaatcctctgcatgatctggaattcgtgttttctttcgcttgttcgtttgtttaattcaataaaggaaattaggcatgaccctcttgttgagtatgctctgcctatctgaaaatttccacacctcttttaattgtcgtaatgatgtgtgaagtgtgtgttatttt

SEQ ID NO: 49046 - DNA, 418 bp, Glycine max
  Clone ID: LIB3139-094-P1-N1-G5
ggaaaaaaaaaaaaaaaatttttattaaaaaaaaaaaaaaaaaaaaaaaaaaaaaaaaaaagggcggccgaaaacataaaaaagataggggacccggaaattatattaagaaccgaaacctgaaaaaaaaaccaaatttcaaatattgggggggggcccccattttggggtttttcgcccccataaatttttcctgggcggaatccttagggcgttccctttttcatttatggggcgggtttaaagcctggggaaaataggggggggggcctttttggggggaaaattttgtttccttagaattgcgccaacttacctgtttcgggaagttaaaactgacaggccgggggccttaatgggggggccaacccccttattgtgggggggtccaattcgcgggtttggggggggaaatctt

SEQ ID NO: 49047 - DNA, 80 bp, Glycine max
  Clone ID: LIB3139-094-P1-N1-H12
ccttgaggtattgtgttgtatttgaagggaccactttcattaaatgtgatgtagaaccggatagattattataccccctc

SEQ ID NO: 49048 - DNA, 339 bp, Glycine max
  Clone ID: LIB3139-094-P1-N1-H8
ggcgttaattcagcttatgtttaaaaggcccacgattcctaactttttttccatagcctgcggccttaactttaatttcctggtttccagggagatgaaccctagctccaatgggtcccattagttacctttttcctgcatctaatatatccaattctttttaattcacacagcatcatgggcgtcaaaggttttgttgaaggaggcatcgtttccatcattcgaggatgttccacacacccacttgatctaatcaaggtcccgatgcagctccagggtgaaaccaatttgcccaaaccggttcaaaattttcgacccggacttgccttccaaaccggt

SEQ ID NO: 49049 - DNA, 379 bp, Glycine max
  Clone ID: LIB3139-094-P1-N1-H9.R2
actgtaaagtgctggatatgtaatataacaacaaaaaaaagatacataacatgatagcgtacaaactacaaatgaagtaatatgattatatatatatatatatatgaaccatccttggagctgaaaaacatagctcataacggatggagcaaccgagaaggaaatcacaaaaccggctccttcttccctggtcatgccaatctacctttacttactacattaaaatattaaaaaaaaacaaaagcaaaaatagggtaaaatagtcaagtaaaagaaaaaaaatgctgcaaggccttgaaatacacggagccttaattcaaaagaaggtttcagaaaagaagtttaaaaggaattgaatataggagtagtattatgcaag

SEQ ID NO: 49050 - DNA, 301 bp, Glycine max
  Clone ID: LIB3139-095-P1-N1-C12
gaaatttcaggaatgaaagcggtgcagacagtttcagaacgatctgcaacacccgtgcactttggtgatatgccagatctctgcctcaaggattcgcttactgctgtgcgtaatgcaacacaagctgctgatcgtatacatcaagtatacagaatgcagtcattccagaggaagcagttaactcagtatgaaagtgatgagcttggattgtcagatcagcaagcactttcccttctagcttccagagcatgcaaatctggacaaggagatggtttagccaatgctgctgcagtacagattc

SEQ ID NO: 49051 - DNA, 416 bp, Glycine max
  Clone ID: LIB3139-095-P1-N1-D4
ggctcgaggtcttgggataccctgacactggtggacaggttgtttacatcttggatcaagttcgtgccttggagaatgagatgctcaaccgcatcaagaaacaaggccttgatatcacccctcgtattctcattatcactcgtcttctccctgatgcagtaggaactacctgtggccaacgtctagagagggtatatgatactgaatattgtgacattctcagagttcctttcagaacagaaaagggaattgttcgcaaatggatctcaagattcgaagtctggccatacctagagacttacactgaggatgtcgcccttgaacttgccaaggagttgcaagccaagccagatctgattgttggaaactacagtgatggaaacattgttgcctctttgttagcacataaattagga

SEQ ID NO: 49052 - DNA, 397 bp, Glycine max
  Clone ID: LIB3139-095-P1-N1-D5
cggctcgaggctagcccattcctcagaccatatcacgggatactgcttgtactcaaatgtgaacagtgagaacaccattgaatcttgattctagcaagcagagcttttgtcaattttctattgaccttctcggtggaggaattttagtggacaaaactggagattggatcacacttatacaaaattctccaattagtaacttgttgagagttgctgcttggaagaaaggttgtttaatggtcaagattgtgatgtctgggaatgcagcagtcaaaaggagtgattgggcctcattggtacaagtgtttttaacaaacagcaacagtacagagcattttgatgcatgtaagtggacaaaatcagaaccacattcctgggaattaatcttcccaataga

SEQ ID NO: 49053 - DNA, 208 bp, Glycine max
  Clone ID: LIB3139-095-P1-N1-D7
ctcacatacaaagtaggatgtacaagtatcaactgactgggttacaatctgtcacgaattggattcgatgacctatccgtggtttaaaatcacataacacttgtgtgttaaatataattgatacagaaaactgactctcctacagaagcactctccgaagtgatcagagaatgcctctttctataaggggcggagctcgaccaaagaa

SEQ ID NO: 49054 - DNA, 231 bp, Glycine max
  Clone ID: LIB3139-095-P1-N1-E3
gattgtaaccaaggcgtggaagatgaggttgcaggtagctggcaatgtgctgctggggcttctgtacatttcctgcaacttatcgcaacatttgcaaaatcctgtattttgcttgaagtttgcgaatatgatggatgaatgtataataattgacttgatgtgcgggttatatatttggatattttgaactttcataactaaccgtgaatgatgaattgttgagtttgcttt

SEQ ID NO: 49055 - DNA, 397 bp, Glycine max
  Clone ID: LIB3139-095-P1-N1-E4
gaaattttgataaaccgcgatcacaggttgccgcaccttaaaaccggaaacaaaagcaatcgttacttgatttcaagaatttctcaatttcttcctacttctttgtgtacgatttcttaagggaaagaaaatcactctctgtgctggccacagacttcgtgaatcattttcttttccactcttagtttatttgctgaacactctcctatttgatataggacttcgtgtcagatttaaacttcttctgtttccttctcagttctctgtttaatttcaagttcaagctggtgaaatcttggattagtgctcccactctcctatctggtataggacttcgtgggtagacttttctatttctctcctttctttcactctcttcttctcactgatccgcatt

SEQ ID NO: 49056 - DNA, 270 bp, Glycine max
  Clone ID: LIB3139-095-P1-N1-F12
ggaggagtatttttcaaacttgtttttacccaatatttgcttaagcctgtaacccaccctgtagaataaggtttggttatgtttgtttcaatttcaacctgttagttatcatgggtgtttgattatatgccataaaggagactgctctagtcaatgagattatgagagtctcttggtttaagacttgatgtaatgcagtcttcatcatctacaattttaatgtgtggaacttgacaatgctgtacattaaaaaaaaagacaagaaatcag

SEQ ID NO: 49057 - DNA, 198 bp, Glycine max
  unsure at all n locations
  Clone ID: LIB3139-095-P1-N1-F5
ctcagaagcaaagaccagcgtcgcggaatgtggcagtatggacatattgagtgggatgacaggacactgctcctcctcctanaaaggctgctgctggccgtaaataagtgtaacaggaggtaaattataaaataggcatcttgagagaacatgactgaagttataggcttgaacaatttttatttttttgagctagag

SEQ ID NO: 49058 - DNA, 409 bp, Glycine max
  Clone ID: LIB3139-095-P1-N1-G10
ggttgatagagcttgtaaaagttgggggcgtgatcgggtacgacaacaccctatggaacggatctgtggtggcaccccctgatgctcctcttaggaagtatgttaggtactacagggacttcgtgctggagctcaacaaagccctcgctgtggaccccaggatcgagatttgcatgctcccggttggtgatggaatcactatctgccgtcggatcaagtgatttctgatcatcataatcgtggaccaccgttgcttcttctgcacaccctatagtgatgactggtcatcattgagtggcacctgctaatgcatttaaaagcaatcaatacttttctttcaaaaaaaaatatgtgtctgtacttttctctattactcgtgtggaaaactgtggacaattaaacgttctat

SEQ ID NO: 49059 - DNA, 350 bp, Glycine max
  Clone ID: LIB3139-095-P1-N1-G3
gcggacaagaaatctcaaaaacaccatcctcttctaagagaacactaagccagggttcagttgatatatatgctgctcagtgcaaaaattgtttgaaatggagagagattgatacacaggaagagtttgaagagattagaagtaaagtgactgaggaaccttttctttgcagcagaaaggctaatagttcctgtgatgaacctggtgatattgaatatgattccactcggacgtgggtcattgacaagcctaacctcccgaagactccacaaggttttaagaggagcttggtgcttagaaaagactactccaaattggacgcttacttaattacaacctgcaggcaaaaa

SEQ ID NO: 49060 - DNA, 407 bp, Glycine max
  unsure at all n locations
  Clone ID: LIB3139-095-P1-N1-H6
cacttagtgctattcaataattacgaaaaaccaacagcgagtgttgtttttgtttggtccaggctggaccagggaatgaatagagatgagaggctttcggttgaagagaactgagttaagcggcgaagccaaacgcagaatcggcggcagaaattgccaccggaagcacgtcgaagacgggtgaaccaaacacaaaattccatccaccacttctcttttcaatccccaactcaaatctgtgaagaaaatctcaatttctaaattgtaattcttagcactactgctagtagtagtaaaaaaaaacaattagaaagtagtagagtgtttttttttctttttttcgnttggtttacttttaagatgggtgagaagagcaacgttggcggcgacgcgattaacacgacact

SEQ ID NO: 49061 - DNA, 356 bp, Glycine max
  Clone ID: LIB3139-095-P1-N1-H7
ctcaaacataaattctttataaacaaaaaaatctacaacaaatacggatatcttcaaatccacaccttctcctcctcaatccatcctttttacataatatatttcctccttaaatccaattaacagggccccccccccccctttttcccccttcccccccgtttttttttccccccccccccccttggcccccccccttttcccttttttgccccttttttaacctttccctaaccattcccctcccttttccctcttttaaatttttttcccctcccctttccccccccctttcctccccgaaacctttattttaaccccccgggcccccctttagtgccccccccccccttttt

SEQ ID NO: 49062 - DNA, 145 bp, Glycine max
  unsure at all n locations
  Clone ID: LIB3139-095-P1-N1-H8
aaaaaaactcactaatttttaaaacaaaacactctctcataggncgatggcttttaaaaactaatatacctaccataacacaaattaaaaaagatccatacaatacaataaaatcataaattctcctcattcaaaccataatatt

SEQ ID NO: 49063 - DNA, 121 bp, Glycine max
  unsure at all n locations
  Clone ID: LIB3139-096-P1-N1-A2
aganaangagggtttgtntatagtttttgaattgacaactacaacatgcaggggtgccagtttatattatagactgcgtgatcatagctacgtacaattaagaccataattgcacacataa

SEQ ID NO: 49064 - DNA, 366 bp, Glycine max
  Clone ID: LIB3139-096-P1-N1-A3
tcgagcatcaagctccgctccaacacatgggaaaatgagggagatccttcacgtgcagggagggcaatgcgggaaccagatctgttccaagatctgggaagtggtgtgcgacgagcacggcataaatacgacggggaagtacgtgggaaactcagatctgcaactcgagcgcgtgaacgtgtactacaaagaaacctcgtgcgggcgcttcatgccacgcgcggtgctgatggacctggagcccggaaccatggacagcgtgcggaccgggccgtacgggcagatcttacgtcccgacaactttgtgttcgtgcagaacagcgccggctacaactgggctaaagagcactacaccgagggcgccta

SEQ ID NO: 49065 - DNA, 169 bp, Glycine max
  Clone ID: LIB3139-096-P1-N1-A6
attgatttttgttgataaaaatactgtagcgttcctctgccacaaagcaacagaaggaaaactcttctgttttacctctaggtcttgtgtgtaaagaacattaactatattgaaagagattgtaatttaccataccagagtttgtagcaagagaaggatgataaccgat

SEQ ID NO: 49066 - DNA, 239 bp, Glycine max
  Clone ID: LIB3139-096-P1-N1-B4
ggtaatgggaggagttcaaccgcttctttttgcgctgtaccaaggattcctgaagatgaaggcaggcagttgacacaaactgcactgacactgacaaagctgctgatgacaccgagtgtggtgatctataacataatcgagtggaccacactcttaattactccaacaaccctgatcattatgaacatggaaggtgtggatgctgcaagccaagatgcactcaatgcaagatatgcgtg

SEQ ID NO: 49067 - DNA, 293 bp, Glycine max
  Clone ID: LIB3139-096-P1-N1-B6
gtcacaaatgacgaaacaactgcattactatgggataaacttatgtatacccatcctcaaacctaacagcagatcagatggagtaaaattctatacatgaagctctatatatgtaggagtataatttaaatgaattgaatggtttttcaaaataccaaaccaccaattcaaagcatttaatgaacaattaatattgtaatctagctagccaagatgagccgcagccaaaacagccttggccaactcaaacaaatgaaagaaaagcacagcagaagaagttggaacactgattg

SEQ ID NO: 49068 - DNA, 128 bp, Glycine max
  Clone ID: LIB3139-096-P1-N1-D5
ctcgagccgaatcggctcgagggcattctgttaattataataacataaaagtaataaaaattcaattgattggttgtccaaacaaaaaaaaaagcttgataatcccaaactaaataaaacttcaatac

SEQ ID NO: 49069 - DNA, 253 bp, Glycine max
  Clone ID: LIB3139-096-P1-N1-E4
aattggttccctgactgaaacgtatccattctcctagtggatcgggattggaaaaatatacactacctaaaaaaaaaaaaaaaaaaaaaaaaaaaaataaaaataaaaaaataaaaaaaaaaaaaaaaaaatctgaattgagttaaatgagcatgtgcggcggtgcgattattttagactttataaaagaaggaaccgccagatgggcaaagataaattttcaacaacatcatttggtataatattatgaaaa

SEQ ID NO: 49070 - DNA, 331 bp, Glycine max
  Clone ID: LIB3139-096-P1-N1-H5
cgcggatggaggaaagtgatgcccttgcaactcttattctaaataaacttcctgctggaatcaaggcatgtgccatcaaagctcctggttttggtgaaaaccgtcaatctgggctacaggatcttgctgctcttacaggaggtcaacttatcaccgaagagcttggtttgaatcttgaagaaaggcacctgtactcatctggctcttgcaagaagataacaatttctaaagatgacactgtcatccttgatggagctggtgataagaaagcaattgaggaaagatgtgagcagattagatcagcaattgaaaatagcacttcagattatga

SEQ ID NO: 49071 - DNA, 366 bp, Glycine max
  Clone ID: LIB3139-097-P1-N1-A2
attaatttcgatcgagagccgcatggaaacacatttgcctaaatcgtctctcgatgatgcggaaactcctaaaggttctatgttggatcttaaaatctctcaatctaaaattgcacttcccaagatcacagttggaggaaccattctgcgtaacgatctattggcaaattttttgacagagggcaatttcagagcaagcgttgatttgcagcgcactcatcgtattaaaggaatgattaaaatggtggccacagttggtattcctgagaatacaggtatagcattggcctgtgctatgaatagttcttttaaggggcgcgccagttctgatatttacaccatctggtctcaagactgggaattatg

SEQ ID NO: 49072 - DNA, 259 bp, Glycine max
  Clone ID: LIB3139-097-P1-N1-A6
ctgaaaaggcggaatcctctgcatgacctggaattcgagcatagttacgcttgatcgtaaggttaattcaataaaggaaatcaggcatgaccctcttgcagagtatgctctgcctatcagaaaatgaccacacaccttacacatgattacgacaagttagagaggtgtggatataatcgtggaagagggggatcttatgatgaatgattttgttggacggccggcttcttttgtgctcgtggacccggtttgttatatc

SEQ ID NO: 49073 - DNA, 396 bp, Glycine max
  Clone ID: LIB3139-097-P1-N1-C3
ctcgagccgaatctgttcgagggaagggtggattcattgagagggtgaaggatttcattcatgacattggtgagaagattgaggaagctattgggtttgggaagccaactgctgacgttactgcgattcacattccatcgattaatcttcacaaggcagatcttgttgttgatgtgctcatcaagaacccgaatccggtgccaatccctctgattgacatagattacttggttgacagtgatcaaaggaagctagtttctggattgataccagatgcgggtaccatcggtgcacatggagagcagactgtcaaaattcctgtcactttgatttatgatgacatcaagcaaacatatgctgatatttaacctggaagcttcattccttattaggtga

SEQ ID NO: 49074 - DNA, 286 bp, Glycine max
  Clone ID: LIB3139-097-P1-N1-C7
gttctagatcgcgagcggccgccctttttttttttttttttatagtcaaacacactcattgcacatagtaatgcgctttatttaagtgaataaaattacatactagttcacaaatgcaaaaggacactcatgaaccagatatttgagactcttacagttctcaagaagtcgcgtcagcatagggttagtggcgttagaactcagaatttcattcttaacgccaaaaagaacagccaataaattatgcataaaaaaaaaaatgataacacaaaaaaaataagaggat

SEQ ID NO: 49075 - DNA, 386 bp, Glycine max
  Clone ID: LIB3139-097-P1-N1-D3
cctttactaacccatctctttctgcttcactatcctccctaaggagggtattcttatgaaccgtcagaagcccaaaatctctgtgaggttcattataatgaatcgggccaagcttatttctcaagctgatatcaacccatactccatgtattggactggtctggccaatacgtcactgacttagggcatctattttctgtgatgccattttcctagtttcaatggtttgattaccaagcaagttctgagcatgactgcttatatgataaacagtctttgttgtgtcgatgaaaaattgacgcttgtaatgacacacctgctgttagcttgttgttcaaggacggcaatttataataaagatttttggagagttatatgtgattcct

SEQ ID NO: 49076 - DNA, 275 bp, Glycine max
  Clone ID: LIB3139-097-P1-N1-E10
cttcgatcacatttgactatttcactgattagaacaggcaaagatgtctctcttgggttgatctttttatgtttcgatcaattgagtttcccattatgacgcttcctgaaaatctaattaattgcaaatttttataagaaaaatgattgattgatattccaaatttgaaattttatttcaaaaattgtaaatcgtttgctaagctagtagaaattttacttgtcaagtaatatatggctcatggttggctaaaaaaaattaaacaaaataaatga

SEQ ID NO: 49077 - DNA, 280 bp, Glycine max
  Clone ID: LIB3139-097-P1-N1-E11
cttcgatcacatttgactatttcactgattagaacaggcaaagatgtctctcttgggttgatctttttatgtttcgatcaattgagtttcccattatgacgcttcctgaaaatctaattaattgcaaatttttataagaaaaatgattgattgatatttcaaatttgaaattttatttcaaaaattgtaaatcgtttgctaagctagtagaaattttacttgtcaagtaatatatggctcatggttggctaaaataaaaaaataataaattttttataat

SEQ ID NO: 49078 - DNA, 375 bp, Glycine max
  Clone ID: LIB3139-097-P1-N1-F3
actgtaatcaatgggttttttatgacggccctcgacttctaagaggcgtgcattttggtagcaggatatggccatgctgacgatatgttccataatcgagtgaacactgcctatagggcccggactcctgaaagagaatgcgcaagttgcaggctggctgtggaaccacacaacatcttttgctttgagaccatttcctgaagagtgcgttgaagctacaaaggaatacatgcatggcgaacaatatagatcatgctccaaaacatgcttaccaacatgcttacttgtattccagagacctcgtagtccatcccaaggacacatttgttgacagcatatttggcaccgtaccctcttatattccatactacataa

SEQ ID NO: 49079 - DNA, 138 bp, Glycine max
  Clone ID: LIB3139-097-P1-N1-F4
cgagttgttcccatcttttttttcgtaccaatcaaatcacactgagggatggtgttgagaaactctaaaccccaattttggagagatcgagatcgatcgaacatggatgaggagttcgacgtgatcgtattaggcacg

SEQ ID NO: 49080 - DNA, 413 bp, Glycine max
  Clone ID: LIB3139-097-P1-N1-G1
cgcaacttcattctattgtcagttggaaggaacaaactgggttaggaatctgctgttgactggatgccttttctgtggacctctgtttctgactttctgctttctaaacactgttgcaattgcttacaaagctactgctgccctcccatttgggacgattgtggctatagttctcatatggacacttgttacgtctcctttgcttgtattgggagggattgctgggaagaatagcaaggctgaatttcaagctcctgttcggacaactaaatatccaagggagattccacctctgccttggtatcgtggaacaattcctcagatggcgatggcaggatttttgcctttcagtgctatatacattgaactttactatatatttgccagtgtttggggccacagaatttacacca

SEQ ID NO: 49081 - DNA, 341 bp, Glycine max
  Clone ID: LIB3139-097-P1-N1-G3
gcgttttaacctccatttctctgcccgaaagcgccggctgggggatgaatcattcccctctttgtgacggccagctccgcctggccaagaaggcgctctacgtcctcgtagccgacatagctgaacgacgacagcaacgccgtcgccaagggtaccgaacgcacccgctccttcgggcgcctagccatatacaccaacaccacttaatacaagtcactagcgtggagcatggccaagaactggtccgtggctaagcaatacccacgcgatgatgtcgaatctgacggtgccacgaggcgcggagtccttaggattggcgcaacccatgttcatgatgagca

SEQ ID NO: 49082 - DNA, 122 bp, Glycine max
  Clone ID: LIB3139-097-P1-N1-G8
atcacaatgaatgtcaattccctccttcataatttgtttaaacggtgtcatttcttttatattttgaaattttgttaactttgttgttgaaattttattctaatgaatttgcatggtttctc

SEQ ID NO: 49083 - DNA, 343 bp, Glycine max
  Clone ID: LIB3139-097-P1-N1-H4
atcttcaggaagtatttatttatcgcctgcagcaaggacacggtgggacagtacgaatctcacacagccttcacccttcctggactctaccggtgtagtgcatggtattgatgtctttgatccaaaattcaacattgtctcccctggaactgttctaaccatttactttccccacactgaaaccagccgtaggttgactataaacacatttgtctccaattagttgttgttttaatctattattgttgctacacgcatattttttcttgaggtccttattatgcctattatttttaccattgctagggtggatcgagtgaagaacatcacaggacttggggag

SEQ ID NO: 49084 - DNA, 427 bp, Glycine max
  Clone ID: LIB3139-097-P1-N1-H5
atttggagcactgttctctgattctcattcatcatttctcacctaaccttctcttcctctcagtctcagatcagaaacctcagccagccatggcagcgttccagaagatcaaggtcgtcaaccccatcgtcgagatggacggagatgaaatgactagggttatctggaagtcaatcaaggacaagctcattttgcccttcttggagttggacatcaagtattatgacttaagccttccttaccgtgatgagaccgatgataaagttacaattgaaagtgcagaagcaactctcaagtacaatgtagcaatcaagtgtgcaactatcactccagatgaagctcgtgtgaaggagtttggcctgaagtcaatgtggaagagtccaaatgggactattaggaacattttgaatggaactgtcttcagaga

SEQ ID NO: 49085 - DNA, 408 bp, Glycine max
  Clone ID: LIB3139-097-P1-N1-H6
cctttaagtgctgcacttaacggagttgaggcattgccatttcaattccgatctgattgatgaactttcaagcatgttcaaacaccatctcaaacttgttctatgtttgctttgtccttttaccaaccatggccttaggagattgcacttgtgacacaatagaggccacaaagagtgactcaatcgaagtgctccactacaaaattggctcaattgcttctgtgcttgttgctggggctcttggggtgagcctcccattgttgagcaagagaatcccaacacttaaccccaagaatgacatattcttcatggttaatgcctttgctgcaggggtgattcttgcaactgagtttgtgcacatactttcagaggcatatgagagcctaacttcaccttggcttaaagaaa

SEQ ID NO: 49086 - DNA, 164 bp, Glycine max
  Clone ID: LIB3139-098-P1-N1-B11
catcttcactgcagttcatctatacagcaagtagatgtaaacctttgctttaagatactgtagtttgtagtgcggggttgaacttattttgagatcgaaaattttgatttggcaatgatactaactgacgtttctaatttattatagatgcattactttttccc

SEQ ID NO: 49087 - DNA, 376 bp, Glycine max
  Clone ID: LIB3139-098-P1-N1-E4
taaacctctaattaagccccccataagaggcggttttctcaagtcagagagagaagaacatctttgtatcagtgttgcatccactctctgatgggtgtagtgaggggggtgatattggatgaatcagtactcttggctgaaagtgatgatgattaaactgtatctttactccgaccatgagctgagtctctcatccaaacactcgttctatccagaacgcatagtggaattgctcatggtgttggccttccagatgacaaggtgagtgttcttaaaaaatctgctagtttgaactcacttgattgctttatcttaaatgatcattgtagggaggttatggctggatggagtaatgctgatgatggcagtgttatta

SEQ ID NO: 49088 - DNA, 95 bp, Glycine max
  Clone ID: LIB3139-098-P1-N1-F10
aaaaaaaaaaaaataattaaaaaaaaaaaaaaaaaaaaaaaaaaaaaaaaaaaaaaaaaaaaaaaaaaaaaaaaaaaaaaaaaaaaaaaaaaaaa

SEQ ID NO: 49089 - DNA, 92 bp, Glycine max
  Clone ID: LIB3139-098-P1-N1-F8
tctagtgactatttgttctggttggccttgcatacatatgttcgcgtgtcttaggataataatcattaatgataaatggtagttgccacgtg

SEQ ID NO: 49090 - DNA, 92 bp, Glycine max
  Clone ID: LIB3139-098-P1-N1-F9
cttttccttttgaagaatttccattattatttccttttcaaaaggtgaatttttcattttctaagtggaagatctctgaaagtcagtttaac

SEQ ID NO: 49091 - DNA, 88 bp, Glycine max
  unsure at all n locations
  Clone ID: LIB3139-098-P1-N1-H4
ttaaatacttattttnttttttgacccttgtatttattatttttccggtacctgctgggggggcaaggggggtctattgtggggcggg

SEQ ID NO: 49092 - DNA, 397 bp, Glycine max
  Clone ID: LIB3139-099-P1-N1-A2
tcgagcaatttttctaagctctactaaacaaagatacatagaaacaatcgaccttagggactattatcaaagcaacatggttttgtcatggacaaaagggagagtgttccggcgtgccagaaagggtaaggagttgaaatattctggtggcgacatggagatagagattgcgatccccacccacttccggtgcccggtaaccttggacatgatgaaggaccccgtgaccgtttccacgggcataacctatgaccgcgacagcatcgagaagtggatcgagtccgggaaccgcacgtgcccggtcaccaaaaccgagctgaccagcttcgacgacatgatcccgaaccacgccatccgtaggatgatccaagactggtgcgtggagcaccgctcccac

SEQ ID NO: 49093 - DNA, 394 bp, Glycine max
  Clone ID: LIB3139-099-P1-N1-A3
gtggattaggcgctattttgagggctttcaactccattgtaacatctctgattacaactggcatcttttggattgcacaccctggtgggcctgcgattttagaccaagttgagcaaaagttgggtctcaaacctgagaagatgaaggccactagagatgtgcttagtgaatatgggaacatgtcaagtgcttgtgttcttttcatcttggatgagatgaggaggaaatctgctgaaaatggacataaaaccacaggtgaaggacttgaatggggtgtgttgttcggttttggacctggacttaccattgaaactgttgttttgcatagtgtggccatctgagatgcctcatatattatttcattattgtgtaccacttttcaaacttgcttggg

SEQ ID NO: 49094 - DNA, 393 bp, Glycine max
  Clone ID: LIB3139-099-P1-N1-A7
tcaactctcccaacacaggacttcaccagcgagattgacctttggaacttctcccgatccacgtcctcactgttggcatcctccgaaccactgtgccacgtgtccaacacgtcagtgtagcgagatcaataaaataataatataaaaaaaaatatctcaagtcccccttttcctccatgttcgattgttaaatatagaaataattagcccctacttcatcacatatcatgtttaatatttaatattagttcttcttctctcaagtctcagaggattattattacagactgttaaatgtgataattctcctagtatacatttttactttaattagcttatttcgactcttgttggtaatattccattgacaattgtctcttgtaaatcttaatt

SEQ ID NO: 49095 - DNA, 611 bp, Glycine max
  unsure at all n locations
  Clone ID: LIB3139-099-P1-N1-E9.F2
gggaaaagccagaaagagcaacgtcagagagtttgccgtagggttctccttggtttgtggtttccggtattgttttgcactgcttcagatacagagagaagggaatccttcttctctctctctctctttctcttttcctgagtttgaacttggagtaactgagtctatatttttgttcatactagtgtggtcatcactggattttcttggtatatataaaaaaaaaacaaaatattgtctcttgggttggttccaaacaagtagaggaaactatcaattaagtttatagtattttgcttcacagatgtacagaactctctccacttttcattttttttattcccgcagattattttttctttgttggggtttcaaagagtaaatattgttaagtagttaagttgtatatcaattttgcctctttgttctgttcttttctcactagtccagttccagctttttcctttttctgttttaggtgaggattgtcctcagatcccagaagctatccagacttgttacatacgaaaaactcagatctatgtctcatgacaattcacanaactncaaatatgagaaaagatgaagggtttgaatatnttgatgtccaa

SEQ ID NO: 49096 - DNA, 55 bp, Glycine max
  Clone ID: LIB3139-099-P1-N1-F11
caaggatgtatgttgtttagtttggaataataatatgggatgaattactactgcc

SEQ ID NO: 49097 - DNA, 142 bp, Glycine max
  Clone ID: LIB3139-099-P1-N1-F2
aaaaaaaaaaaaaaaaattaaaaaaaataaaaaaaaaaaaaaaaaggaaaaaaaggaaaaaaaaaaaaaaaaaaaaaaaaaaaaaaaaaaaaaaaaaaaaaaaaaaaaaaagggggcggccccctccttttgacctcttccc

SEQ ID NO: 49098 - DNA, 211 bp, Glycine max
  Clone ID: LIB3139-099-P1-N1-F7
ctagttctagatcgcgagcggccaccctttttttgtgttttttgtggtttttttttctttttttttttttttttttttttttttttttttttttttttttttttggcataaaaaaatgaatttttatttttggttccaatttaaaaaaatgccagacaaagaggacaacaaacaatttccaacaagcaacacttttttttatttaacttgg

SEQ ID NO: 49099 - DNA, 75 bp, Glycine max
  Clone ID: LIB3139-099-P1-N1-G1
ctcgagccgaatcggctcgaggttctttcagaacatatatattttatatgatgaaacaaaaaaaaatgttctctc

SEQ ID NO: 49100 - DNA, 240 bp, Glycine max
  Clone ID: LIB3139-099-P1-N1-G3
aagaaaattgtttttcttactagagttgatccttttccagtagctgtattggctgttctttttggcgttaagaatgaaattctgagttctaacgccactaaccctatgctgacgcgacttcttgagaactgtaagagtctcaaatatctggttgatgagtgtccttttgcatttgtgaactagtatgtaatattttattcacttaaataaagcgcattactatgtgcaatgagtgtgttt

SEQ ID NO: 49101 - DNA, 362 bp, Glycine max
  Clone ID: LIB3139-099-P1-N1-H4
cattttcttttccactcctagtttatttgctgaacactctcctatttgatataggacttcgtgtcagatttaaactttttctgtttctttctcagttctctgtttaatttcaagttcaagctggtgaaattttggattagtgctcccactctcctatctggtataggacttcgtgggtagacttttctacttctctcctttctttcactctcttcttctcactgatccgcattgccgttcaaagtggtcttatttgaaaaacacttgggcgttggtgcaaatgtttgcttcgttaattttctctggagacaacaggctcactgagaaaacaatttttacttgcagagatttggacatctttg

SEQ ID NO: 49102 - DNA, 392 bp, Glycine max
  unsure at all n locations
  Clone ID: LIB3139-099-P1-N1-H5
tngaggttttttgggtggctcctgaggacattgcgagtttatggtcacagcttcattgtgtttcgtgtaataatctggaaatgcaagaagcttatcttgtcaacctcgtaaatgtgttacgagaattgtatttgcacagtccagaggaagctcgccaattgagaaggaaagctctctctcgtattgaatggctgcaaaaagctgatgtgcctaccatagcacagattgaagagttccattcgatgcagaggatgatgaatgctcctgattcaaatgataatattgatttactgttgagcattgatttgttgggtttacaaggagcaggtaaagcttttccaaacaaaattgtttttgatgataagcttgtgttggctaacacacaagaattc

SEQ ID NO: 49103 - DNA, 459 bp, Glycine max
  Clone ID: LIB3139-100-P1-N1-A1
agatcctcaatacaatgaggttcaggctcagatggaaacaaatttgtttaaattgtctcttgatgatgttgaaactcctaaaggttctatgttggatcttaaaatttctcaatctaaaattgcacttcccaagaacacagttggaggaaccattctgcgtagtgatctattggcaaattttttgacagagggcaattttagagcaagtgttgatttgcagcgcactcatcgtattaaaggaatgattaaaatggtggccacagttggtattcctgagaatacaggtatagcattggcctgtgctatgaatagttcttttagggggcgcgccagttctgatatttacaccatctgctctcaagactgtgaattatggaatcctgcttgcacaaaagcaatgactatgtcatttaatccaaacccgtgttctgatgcatggagtttggaatttctgaagcg

SEQ ID NO: 49104 - DNA, 92 bp, Glycine max
  Clone ID: LIB3139-100-P1-N1-A11
gcatgaccctcttgttgtgtatgctctggctatctgaaaatttcggcgcctcttttaattgtcgtaatgatgtgtgaagtgtgtgttatttt

SEQ ID NO: 49105 - DNA, 526 bp, Glycine max
  Clone ID: LIB3139-100-P1-N1-B1
ccattttcagttcacagggttaggtttaggtcccttgtctggtctggtgtgcaattctccccatacaataacaatacacccactttatcaaccaatcaatcaatatacctagtagtgattagatttagtgatcgatcctctcctttcgttctcaaaccgtagatttagattttagggtttctctcttaatataatcttttgacacttccgtaacaaacaaaaaaattacataaattttcccttataattattattatttggcttttatctttggattaactaggcttgagctatcacaaataattgtttcggagaatggaaaagaaaaaggtggcagttcccctcgtgtgccacggtcattctcgccctgtggttgatctcttctacagtcccgttacgcctgatgggtttttcctcatcagtgccagcaaggattcgagtcctatgctcagaaatggagagactggagattggattggaacatttgaaaggcacaaaagtgctgtgtggagttgctgcttggata

SEQ ID NO: 49106 - DNA, 521 bp, Glycine max
  Clone ID: LIB3139-100-P1-N1-B3
ggtccaaatggcatccccattgctactataccaagagtaacctcactgctgcacaaaacaaaacaaaaacttactaaactaacatggctttggggaacaacagtcaccagcttctgtcgaaaattgcaaccaacgacaagcatggagaaaattccccatactttgatggatggaaggcctatgattcaaacccattccaccccacaaaaaatcctcagggtgtcatccagatgggtcttgcagaaaatcagctgtgctttgatatgattcaagagtggataaggaacaatcctaaggcctccatttgcactgctgaaggagtgaaccagttcaaatatattgcaaactttcaagactatcatggattgccagagttcagaaatgctgtggcaaatttcatgtcaaaagtgagaggtgggagagtgagatttgatcctgaccgtatattgatgagtggaggggccacaagagcaaacgagctaataatgttctgtttggctgatgctggagatgcttttctg

SEQ ID NO: 49107 - DNA, 483 bp, Glycine max
  unsure at all n locations
  Clone ID: LIB3139-100-P1-N1-B4
gcaaaaattaatcttctttcgggttcactggaccgagagtaagagactaatccctcgagatactgatactgaaacctatcgttcttcacatcataaccatgcgttccagcaacggtgcatcaagcagcagagcctccaatgctaacacagggcgccaccctgtgtaccgtggagtgaggcgtaggagtagtggcaaatgggtttctgaaatccgagaacccaaaaaacctaacaggatttggttagggacatttgccacccctgaaatggctgctattgcctatgacgtggcagcgcttgctcttaagggtaaggatgctgaactcaacttccctaactcggcttcctccctccccgtccccgcatcatccgctgctcgcgacattncagaatgtgnngctagcgccgcagccgctggcngagctgcgaatgatgcactngaaggaagccgaggagggaatgcttcggtttcattgacagaag

SEQ ID NO: 49108 - DNA, 259 bp, Glycine max
  Clone ID: LIB3139-100-P1-N1-C10
cgaaaaaaaattatatattttattcaacataaacatcataaataataagcagtaaaataaaacattaccaatagcatatttattaaatacttgacctgacacgtaactatctaaatccaagttgcaatgtttacaaaaattgtgactcatttgtgaggccatcgtttaggcttccaacacttgccataagcactacgtcactctatactttagtgcggctacgccattaaggtaaatggctcgctgtaatacgactttc

SEQ ID NO: 49109 - DNA, 600 bp, Glycine max
  Clone ID: LIB3139-100-P1-N1-C4
gttggaaataaaatggtcttcaaaggagattattagtgcaaattaaaaaaaaaaacaaaatgaaattccttaattgattaatcaataatattttaagataaagtgattttagtaatgtagtcataaggaccaccctaattgattaattgtgtttccactttttgttttattgttaatcaggtggatagtcgacactcggtagtggtgccggacagcaacattttctacattatagccttgctccgatttattccaccacccccaaagggaccacctacagaactgttggtggaacaaaaccatgagattattcagttatgctacaacagaggctttgatttcaagttatatctccctcactaccagtcacaggagaactggatgcgacactatggagataagtggaccagattcgtcgagagaaaggccaattttgatcccttggctattcttgcacctggacagaaaattttttcccgaatccctcaaaccttgtctatcacataaatattatttagattaatatattggtttttcttttttcttctcaacccactgtgatcattttgtccttgaattcatttttttttcttctttctc

SEQ ID NO: 49110 - DNA, 514 bp, Glycine max
  Clone ID: LIB3139-100-P1-N1-C9.R2
actgtaaagtgctggatatgtaatataacaacaaaaaaatgatacataacatgatagcgtacaaactacaaatgaagtaatatgattatatatatatatatatatgaaccatccttggagctgaaaaacatagctcataacggatggagcaaccgagaaggaaatcacaaaaccgtctccttcttccctggtcatgccaatctacctttacttactacattaaaatattaaaaaaaaacaaaagcaaaaatagtgtaaaatagtcaagtaaaagaaaaaaaatgctgcaaggccttgaaatacacggagccttagttcagcagaaggtttcagaaaagaagttaaaaaggaaatgaatataggagtagtagtaggcaaggttcacaggttgttgtggtgaaaatatctgcaaccagtgagtgagaagtaagtaactaaggaaccatcaaagtgtcctaaaatgtaatgaaggagtggatgatggataaatgataatcatggatatgcaaccagg

SEQ ID NO: 49111 - DNA, 259 bp, Glycine max
  Clone ID: LIB3139-100-P1-N1-D6
atattgagaaaggcggggattacactatgcaaactctcttctgtgtcgatgtatctctcactatgctttgaaaggtcgggaaacccactgcatgcatggacaatcgcgttattttcagtgagaaaaattgaaccttcttcacatgtcgtcggacataagctagcttattagccactcttgcttcccttgtaacaatctccacaccccttatggaatcttacaggggtatgaacgggggtgtttttcaaagaaaagttgc

SEQ ID NO: 49112 - DNA, 510 bp, Glycine max
  unsure at all n locations
  Clone ID: LIB3139-100-P1-N1-D9
tcgacgcgatctattcggcaaattttttcgacacgagggcannattttagagcaacgtgtgtganntttgcagcgcaccttcatcgtattaaaaggaatgattataaatggtcggccacacgttggtatttcctgagaatacacggtattagcattggcctgtgctatgaatagttcttttagggggcgcgccagttctgatatttacaccatctgctctcaagactgtgaattatggaatcctgcttgcacaaaagcaatgactatgtcatttaatccaaacccgtgttctgatgcatggagtttggaatttctgaagcgtaccggatttcattgtgatatcatttgtgtcactggatggactgccaccccaatgcaggatgttcaggttacaattgattggtttatttcctctcaggaatgtgttcccaggacctattgtgttttaaatccacaaaatccttttgtgttaaataggtggatgggaaaactgactttcccttcaggcac

SEQ ID NO: 49113 - DNA, 506 bp, Glycine max
  Clone ID: LIB3139-100-P1-N1-E1
gcaagtgttgatttgcagcgcactcatcgtattaaaggaatgattaaaatggtggccacagttggtattcctgagaatacaggtatagcattggcctgtgctatgaatagttcttttagggggcgcgccagttctgatatttacaccatctgctctcaagactgtgaattatggaatcctgcttgcacaaaagcaatgactatgtcatttaatccaaacccgtgttctgatgcatggagtttggaatttctgaagcgtaccggatttcattgtgatatcatttgtgtcactggatggactgccaccccaatgcaggatgttcaggttacaattgattggtttatttcctctcacgaatgtgttcccaggacctattgtgttttaaatccacaaaatccttttgtgttaaataggtggatgggaaaactgacttttcctcagggcactttccgaagtgttaagagaatgcctctttctatagggggaggagctggtgcaaagaatgc

SEQ ID NO: 49114 - DNA, 266 bp, Glycine max
  Clone ID: LIB3139-100-P1-N1-E3
ggttcaaggaattcgacgacccgctcgaatccgccatcaaaacttaccagaagaacttcaacctgaacgttactggcgttctcgacgacgccaccgtgcagcagatcgtgctgcctcggtgcggcgtcgccgatataatcaacggcacaaccacgatgaacgccgccaaggagaacgagacggcgtcgtttagcaagccgaagtttcacacggcggcgcacttcactctttttcctggcatgccgcggtggccggagggaacgcat

SEQ ID NO: 49115 - DNA, 61 bp, Glycine max
  Clone ID: LIB3139-100-P1-N1-E5
agagcttgacgtcatgcgcgcgcgcgctaagtcgggaattccggcttgggatcctctaaac

SEQ ID NO: 49116 - DNA, 469 bp, Glycine max
  Clone ID: LIB3139-100-P1-N1-E6
ggataaatataaaacagacgtttttttaattaagctcgaaaacaccggggggggaatttcagaccgatacactgaaaacataccaaaatatacatataaagaagtacatattaaaaaaagggggggccccccattttaagctttttcctccccgaaattaatttcgggcccggaccttgaggggtaccaatttttccttttatggagtgttataaaagttgggcgtaataagggaaatagctttttcttggggaaaatggttttccgttcaaatttcaaaaaaaaatccaaccgggaaatttaaatttaaaaatcggggggccctaaggggggggctacttccctttattgggttgggcttaattgccctttttccagtgggaaaacttgcgggcccatttgatttaataaatggcccaccccccggggaggggggttttgctttttggccccccggggggtttttttt

SEQ ID NO: 49117 - DNA, 565 bp, Glycine max
  Clone ID: LIB3139-100-P1-N1-G6
cctggttttgtcatctaagaaaacctagtgagagtaagcacacattgatcagcaacaatggcagcctactcaagccatgctttgaaaaccatccctttttcttcctttgtgaagcctgtcagtaccaaaccaacatcattcttcacaccttcacctaccaaacctttcttacccttcacctcaccaaaccactctctcaccaaaaatctcaagctgaactccactttgccacacttttgcttgtcttcagttcccaagaaatctttcacttgtagaagccaggctgagcctgttgactcagaaaaagtccaagaactgagtgtgtatgagatcaacgagcgtgaccgtggaagccccgtttatcttcgattgagctataaaagtgtcaattcccttggtgatttagtcccctttagcaacaagttgtacactggagatttgcaaaagcgcattgggataacatctggtatctgtattttgatccaaaacaaagctgaaaagaaaggggacaggtatgaagcaatcttcagcttctactttggagactatggtcacatagcagtgc

SEQ ID NO: 49118 - DNA, 462 bp, Glycine max
  Clone ID: LIB3139-100-P1-N1-H10.R1
tgttttttttttttttaatgtaagatagagaaacttccatattgtagacagataaatcagggtatatgtttgagttaccatcagaaaaaataacttcaactggttcaatgacaaatttgttttcacaatattctgagaaggctattacctcttactgtcatataacagggaaaacaggggaatcctcaattatatgcaaggatttcttagagtttcaaattttgtagaactccattagctcatcagccctgaagtttctttcgtgagaaagtatgagttgaatcacgtgcttttgtgctataggaggcagcactccttccaactcagaataaggaggctgccttgtcaacatctccagaactgtacaccctaagctccatatatcagctgctagcccataagcaccttggttctttaagttaaaaacctcaagggccatgcagtatgggagcctttgcttga

SEQ ID NO: 49119 - DNA, 542 bp, Glycine max
  Clone ID: LIB3139-100-P1-N1-H4
ctccatactctcgaattgcgtctggctttgaaagcttaaaggtcatatttcttgtgtttaccaattttgttctggttaaggtgaatacaattggcaaaattattgacccttaaccaaaggggggttggtgatcgtaaacttcttactgatgggaagttgtatgagggtaagcatattcctgtatctaatattagcgcaggggaaaatcatgtagttcaaatacccttaatggcacaggaggaaattctgtcttctagtgcaagtgatttcagagctgcaatggtgagtaaaaatagcaagcctcaagctactgcaatgcatgtgggagctatagaaattatcattgatagtttcgcaagtcctgattgcaacatagttggtgcaatgcttttggttgatacttatcataccaatcctgaaaatgcagttcgtagtatttttgttgcgcctttcagaggcggaaggcccattcgggtggttacattttcgaataccattgtgcagattgaaccagacatgaattcaaggtttcagcttttgag

SEQ ID NO: 49120 - DNA, 71 bp, Glycine max
  Clone ID: LIB3139-100-P1-N1-H5
ctgaaacgtttcacgtttttcggcgacgtccagatgacgagtttgaattttagttcttctatttatttatt

SEQ ID NO: 49121 - DNA, 134 bp, Glycine max
  Clone ID: LIB3139-101-P1-N1-A1
ggggaaggggaccacggcttaatgggtggctcctgaggtcaaggcgaggttttggtcacatcttctttatgtctcttgcaataatcagagaatgcaagaagcctatctcagaaatcccggaaatgtgtaacgag

SEQ ID NO: 49122 - DNA, 222 bp, Glycine max
  Clone ID: LIB3139-101-P1-N1-A5
tgcaaaatctacatgtttttcgcgacagtttttccaaacaagaggtggatttttaaatgggcctgcgaaaactcacacacaatactattgatgtggagatcttccaaaaggttgctggaacacaacttagtgaaccgtgtttaccctgtaagacaattaccttaagccgctgccagggtcaagtgcacatgcgtgagtggacgggcgggctgggctcatgaa

SEQ ID NO: 49123 - DNA, 185 bp, Glycine max
  unsure at all n locations
  Clone ID: LIB3139-101-P1-N1-B1
ggaaaaggcggaatcctttgcatgacctggaattcgggttttctttcgcttgttcgtttgtttaattcaataaaggaaattaggcatgaccctcttgttgagtatgctctgcctatctgaaaatttccacacctcttttaattgtcgtaatgatgtgtgaagtgtgtgttattttaaaaaanaaa

SEQ ID NO: 49124 - DNA, 376 bp, Glycine max
  Clone ID: LIB3139-101-P1-N1-B4
gaaaaatccactttggttgttcacttgtatatgtatctcagtctcaggtggtggtgcatcgctgagttgtgtgagagtgagaaagagagagtgtgtgtgtgtgcagaagatgtggccattcagcagaaaaggggcttctggtttttcatcatcatccacggcagagcaagtcactgaaggaattgatggaactggtctcactgccattgtcacaggagcatccagtggtattggcactgagactacacgtgtcctttcattgcgtggtgtccatgtgattatgggtgtgagaaatatgcttgctgctaaagatgtcaaagaaacattacttaaggagattccctccgctaaaagtgatgccatggaagtagatctc

SEQ ID NO: 49125 - DNA, 232 bp, Glycine max
  Clone ID: LIB3139-101-P1-N1-B9
ttttttttttggttaaaataaaaatggattttctttttggtttcactggggaacatgacccaaagaggatttaaaaaaaaaaaaaaggtacaacaatagatttcagattttatctaatgggtaatgacaccctatctatctccctctttcttccgattaccattctccttcggatcgatcgagttatgtctaactgtacattaaccataattattgcctaaaaacattgttt

SEQ ID NO: 49126 - DNA, 209 bp, Glycine max
  Clone ID: LIB3139-101-P1-N1-C1
cccccttccttagcctcggatttcgcttcgagaaactattacatcctttgggaggtctgttctggtctggtggcattatattatgggttaataaatcatgggtgttcccataatgtaaccctttttatgtgtctctttatgtgttagccctatgttacttatatcatatgtacgactgtgatataaataaaagatttttattctcttat

SEQ ID NO: 49127 - DNA, 337 bp, Glycine max
  Clone ID: LIB3139-101-P1-N1-C6
caaatggcaacagtgagaacaccattgaattttgattctagcaagcagagcttttgtcaattttctatcgaccttctcggtggaggaattttagtggacaaaactggagattggatcacacttatacaaaattctccaattagtaacttgttgagagtcgctgcttggaagaaaggctgtttaatggtcaagattgcgatgtctgggaatgcagcagtcaaaaggagtgattgggcctcattggtacaagtgtttttaacaaacagcaacagtacagagcattttgatgcatgtaagtggacaaaatcagaaccacattcctgggaattgatcttcc

SEQ ID NO: 49128 - DNA, 376 bp, Glycine max
  Clone ID: LIB3139-101-P1-N1-G2
gggtcatagggtcctgttggggttagggattcgaattttgattatcgaatcgcaaaattctgaatcaataaatcagtaattagagccattaacgactgcaatggtctgcgagaagtgtgagaagaaattatcgaaggtgatagtaccagacaaatggaaagaaagggccagcaatactaccgagggtggtggccgcaagatcaacgagaacaagcttctctccaagaaaaacagatggaccccttacggaaacactaagtgcaccatttgcaagcagcaagtgcaccagaatgctaagtactgccacacctgtgcttactctaaaggagtttgtgcaatgtgtggaaagcaagttcttgataccaagttttacaaa

SEQ ID NO: 49129 - DNA, 391 bp, Glycine max
  Clone ID: LIB3139-101-P1-N1-H3
taatagttagaaaaaattatatttttggtctatccctttatctctaattttaaatttaattcccactaatttaattcataaatttcatctttctattttgtgaaattgtgcaatattaacacaattaaatattgattattaataagtgatgttgataatcacatgtcacctttttattgaatcatgactgtcacgtgtcatattctaattggtcaatgaaaataacaatgtatttcatcttttatggagttgacatctaatcagaacatgacacgtgaccgtcattatccaataaaaatatgacatgtaacagttaacatcactcactaacaatcaacatttagttataacctagagttacatgattttataaaataaaaaaactaaattt

SEQ ID NO: 49130 - DNA, 380 bp, Glycine max
  Clone ID: LIB3139-101-P1-N1-H6
ctttcgttattctcttattcatccttaaatatggaaggatccagcccttactgagcggacaatttatcttacactatccaatacatcatcatgaattgacattcaactctaattaatccactctacaatggcacaatccataatttttgtcccattattatatacatcaatcaaatgaatgcattacacaaccaaccacacttatgtcccataataggcttccttaaagccaaagcaatgaacaattcaaagaaccatccaaagctcaaaagaagcatttgctttgcatcaatcaccacgctatgtgttggcttctggatctggagattggaaaatacgttgagccaaccattgaaagggtctcaagagttgagcccttt

SEQ ID NO: 49131 - DNA, 393 bp, Glycine max
  Clone ID: LIB3139-102-P1-N1-A2
gaattatggaatcctgcttgcacaaaagcaatgactatgtcatttaatccaaacccgtgttctgatgcatggagtttggaatttctgaagcgtaccggatttcattgtgatatcatttgtgtcactggatggactggcaccccaatgcaggatgttcaggttacaattgattggtttatttcctctcaagaatgtgttcccaggacctattgtgttttaaatccacaaaatccttttgtgttaaataggtggatgggaaaactgacttttcctcaaggcactttccgaagtgttaagagaatgcctctttctatagggcgaggagctggtgcaaagaatgctattctcatgaatatgccaaaagctggtcttttcaatgtgggagatattttg

SEQ ID NO: 49132 - DNA, 104 bp, Glycine max
  Clone ID: LIB3139-102-P1-N1-A7
aaaaaaaaaaaataaaataaaaaaaaaaaaaaaaaaaaaaagaaagggaaaaaaaaaaaaaaaaaaaaaaaaaaaaaaaaaaaaaaaaaaaaaaaaaaaaaaaa

SEQ ID NO: 49133 - DNA, 393 bp, Glycine max
  Clone ID: LIB3139-102-P1-N1-B2
ttcccaaaatggagcccaattcttagagaaacataccttgatcgtttatctctaagatatgaaaaagaaggaaagccatctctgttagctgatatagacgtgttcgttagtacagtggaccctatgaaggaacctccactcattactgcaaacacagttctgtctatccttgctgtggattatccagtggacaaggttgcatgctatgtttcagatgatggagctgccatgcttacatttgaagcactttccgagacttctgagtttgcaaggaaatgggttccattctgcaagaagttctgcattgaaccacgggctcctgaatggtattttgctcagaaggttgactacttgaaggataaagtggatgcaacatttataagaaaacgtcgt

SEQ ID NO: 49134 - DNA, 438 bp, Glycine max
  unsure at all n locations
  Clone ID: LIB3139-102-P1-N1-B5
aaaccataaacagttgagaaaacttcgttataaattaaatgcaacttaaaacatccctcagcagcaaaggaaatggactaaaaccctatagctgcttgtgaaattcgaaatatctcagactcttcttaccatcaaaacaaaaaacagtactcatcaaaaacaaacagcaatgaaaattgaccaccgccgatcaagaacctagttttgaaagttacgggtacatgaaatcggcagaaacttaaaaatataacttaaacaaaacacctaagactctgcaaggataaaactactataaaggagtaaccacgatgatgatcacatgtgctagcaaaattgcccaaatgcaatcacttcttcttggcagcggccttggtgaccttggctccgggggngtctttcttctcaacactcttgatgactccgacagccacagtttga

SEQ ID NO: 49135 - DNA, 356 bp, Glycine max
  Clone ID: LIB3139-102-P1-N1-B7
ggatgctactacacccaagtattccaaggccaggtatgatgaaattgtgaaggaagtctcttcctacttgaagaaagtaggatacaaccctgacaagattccttttgttcctatctctggttttgagggagacaacatgattgagaggtccacaaaccttgactggtacaagggtccaactctgcttgatgcacttgaccagattagtgagcccaagaggccctctgacaagcccctcaggcttccccttcaggatgtgtacaagattggaggtattggaactgtgccagtgggacgtgttgagaccggtgtctttgaacctggaatggggtgacttttgcaccaactggactgac

SEQ ID NO: 49136 - DNA, 101 bp, Glycine max
  Clone ID: LIB3139-102-P1-N1-C4
cagattgtcgctcgagtacagcgcccacgggactgtcttaacccacaaatataactcatattggggcttgcaaaaaaaaaaaaaaaatacttttatttttt

SEQ ID NO: 49137 - DNA, 410 bp, Glycine max
  Clone ID: LIB3139-102-P1-N1-C6
ttgacagttgctgtagaaaggccaagagttccacaagtcacctgcaaaggtttgagtagtgatggtagcacacacgttgcctgttccattggtacaggaccagtggattcggcttacaaggctgttgatctgattgtgaaggagcaagtaacacttcttgagtactcgatgaatgcagtgacagaaggcattgatgcaattgccactacccgggttgtaattcgtggggagagtgaaacaagtactattactacccatgctttaacgggagaaactgttattcgaacatttagtgggactggagcgggaaatggatgttgtgtttccagtgtcaaggcctatattgctgcactaaacaagatgtcgggtttcaaggaatcctctcaatctgctgaaaaaatttcaatttc

SEQ ID NO: 49138 - DNA, 141 bp, Glycine max
  Clone ID: LIB3139-102-P1-N1-C7
attttttgaacctgcatttgtatgctaagtaaataggtccttcagcttatatatatatgcaagagtgtaaaaaacctgtagctaatatacgcgacagtgataatcgatcaatgctactgaatcattatttcatgacaattt

SEQ ID NO: 49139 - DNA, 333 bp, Glycine max
  Clone ID: LIB3139-102-P1-N1-C8
cacaaaacaaagaatcattcagctggagtcctaggttgtgtgttgctgtaaattttactttcaatttggggaattaactcccccaaattttatattaacttcttttttgtttttccctcttaaatgatataggaattcttttggttcatttgtaattttgtcaactagatattatcaattatttgttagaagatgccaaagaagggctgctagcactttagcagccaaggatgtttgtctggggtaaaagtatttgatgacctctggatgaaatctttgtacaaaaacctacagtaacgttctaggaacacgttctatacatgtatatgactt

SEQ ID NO: 49140 - DNA, 249 bp, Glycine max
  Clone ID: LIB3139-102-P1-N1-D11
atctggaatttgtgttttctttcgcttgttcgtttgtttaattcaataaaggaaattaggcatgaccctcttgttgagtatgctctgcctatttgaaaatttccacacctcttttaattgtcgtaatgatgtgtgaagtgtgtgttattttaaaaaaaaaaaaaaaaaaaaaaaaaaaaaaaaaaaaaaaaaaaaaaaaaaaaaaaaaaaaaaaaaaaaaaggcggacaacaacataaaaagctaaaaa

SEQ ID NO: 49141 - DNA, 359 bp, Glycine max
  unsure at all n locations
  Clone ID: LIB3139-102-P1-N1-D5
atttataacttttaagtccatgctatcatatcatacaattattctgatattcaaggggacccaccaatctgtgtattgtaaccttattttttgtgagatagcagatggagattccatttcctggttgatgatggctttgcatcaaggagagtctgataaaaaaccatgtctttaccaagaagcaaagtgacatgcttaggaaactcccaatcatagagggaaggactgttaaaaggctgctaacactgagaagctgctgttaaaagtctgatcaaaaccatatctccataacttgtgtttgtatcattattattaactactgttactaattgtgtatacttgtatgaaatttgaacana

SEQ ID NO: 49142 - DNA, 181 bp, Glycine max
  Clone ID: LIB3139-102-P1-N1-G11
gttatctatcgattgttcgtttggataattcaataaaggaagtggggcttgaccctattgttgagtatgctctgcctatctgaaaatttccacacctcttctaattgtcggactgatctgatacgtgagtgttcttttcaaaacttagagacagatgcagattggaagcgggcggtcttca

SEQ ID NO: 49143 - DNA, 353 bp, Glycine max
  Clone ID: LIB3139-102-P1-N1-G2
cccaagaacccaaccgtacctgtgatcatttgtctaacaaattgccggcgagtgtcaaattgctacgttctttcccgcttcatctacctttccaccctgcacatagctgccagcctgtaatcacccacgaacttcatcaagttctcgtgcagacacacccagttcgcaggcctgtgtattcagatccttcttcgtgtactcctacaccattcaacaagaccttcacgggctcgtacagacagccctctaactctcccttaaccacaccgaggccaccaaaaccttcgtcgcataatgcaacagattcagaggcctcataccgagagaatacgctgtcttgaaggactgcgctg

SEQ ID NO: 49144 - DNA, 441 bp, Glycine max
  Clone ID: LIB3139-102-P1-N1-G3
aggatccccaagaggcctcctggcaggtccttggcaattccttcgggtgtttttttcctcctaagcttcttaatctttccaaccaaagcagctccaatttacagttcccatgcgtgcacagactcttctaaataccaaccaaacagcacattccaaaccaacctcgacctcctcctctcttacctttcttccaacgccacccaaggcgtccacttttacaaaacaacagttggcagtgaaacccccaacgccgtcaagggcctcttcctctgccgccgagacaccctcaccgacgtgtgccacgattgcgtcaacgccgcagccaaagacctgacacgccggtgcccagttgagaaagaagccataatctggtaagacgtgtgcatggtacgctactccaaccaaaactaccttaacaacatagtaccccgagtggacatg

SEQ ID NO: 49145 - DNA, 335 bp, Glycine max
  Clone ID: LIB3139-102-P1-N1-H1
ggagggcagggccggaccagcttctttctttacaacttacattttattatctggcttggccaggttggcaggtgaaggtattcaaatttttcctttactacgcaatctttttcagagattcatactcaagcttaaagaaaatgcactggatggcagcctatctttttcgtaccatacagaagttccaagaatcttactggttggattcctcgggttcacttgtgctattctggcacccctaatggtggccttcttggtgggctactttttcaatggttaccttggttatccgaacccgattatcaacgtatacattacaaaataccatagggggg

SEQ ID NO: 49146 - DNA, 472 bp, Glycine max
  Clone ID: LIB3139-102-P1-N1-H12
ttggaattcgggtcgagaattgcagaagaatttgaattcgaataaagtgaggttggtgcatgccgagtttatttggactgagccccattccagaagggtaaaagtcaaggtcaaggttcagaaggaggttctgaatggagcaatacttgaacagtcttatcctgtagagtatgttcaacaagagcatatgtgtgaatcctgttctagggtccaggctaatcctgaccagtgggttgcttctgtgcaactcaggcaacacgtttctcacaggcgcactttcttttatttggagcagctgattctgaagcatggtgctgctgccactgctataagaatcaagcagatggaacaaggtattgacttctttttctctaatcgaagtcatggagtcaaatttgtggagtttataggcaaagttgctccagtaaggagccgtcacgataagcagcttgtttctcatgatccaaagagt

SEQ ID NO: 49147 - DNA, 319 bp, Glycine max
  Clone ID: LIB3139-102-P1-N1-H2
gctaggaaaccataactcgctgccattgatggccttgccttgggtggaggattagaagttgcaatggcactcaacgctcgatcaataactgccactgctcacaatggcttgcctgaacttaaccatggaatatatcctggatttggaggaacacaccgacttcctcgcttgatggtttgacctagggacttgacatgatgaaggcgttaaaaccaattaaagggcacgtggcctttaaatggccgcactcctataggtccactgaccccgcggataccctgtctaccgaaaacggatgatcaatggattcattccaaaa

SEQ ID NO: 49148 - DNA, 386 bp, Glycine max
  unsure at all n locations
  Clone ID: LIB3139-102-P1-N1-H3
gatggcaatttgtaaaaaagatgtttgaagagttgaatgtggaatcccttctgaatttccgctcacaagtatttgcaatagcatttttaatgagatgctcattagatatagctatgaaaaattactgcgccaggctaaagctccaagtatgtttttacaatccttcaaaaattttgtttctttgtgtgtgtatggtgatgataacttaattagtgttcatgaatatgtcaagccttactttagtggttctaaattgaaaagctttctagctggtcataatatcaccattactgatggtattgacaaaactagtgcaactttgcaatttagaaagttagcaaattgtgattttctcaagaganaacttaagcagatgtctaatgttt

SEQ ID NO: 49149 - DNA, 425 bp, Glycine max
  Clone ID: LIB3139-102-P1-N1-H6
agtcctgatttgccggaggcacggtgcttcgtttggccaaagacctcgctgaaaacaacaagggtgctcgcgtgcttgtcgtttgttctgagatcaccgcagtcacatttcgcggcccaactgacacccatcttgatagccttgtgggtcaagccttgtttggagatggtgcagccgctgtcattgttggatcagaccccttaccagttgaaaagcctttgtttcagcttgtctggactgcccagacaatccttccagacagtgaaggggctattgatggacaccttcgcgaagttggtctcactttccatctcctcaaggatgttcctggactcatcttcaagaatattgagaaggccttggttgaagccttccaacccttgggaatctccgattacaattctatcttctggattgcacaccct

SEQ ID NO: 49150 - DNA, 436 bp, Glycine max
  Clone ID: LIB3139-103-P1-N1-A4
gagtgcagtttggagagattcaggaaaaagttgtattgaaattttcacaagaggaatttcttacagcttggtcaactcaagtgcgtcctgcaacaactctgttggctgatgggtgtccatatttgtatgcaatggtgcatgatagttcagtgtctacaataccaggtgattttgtcattggtgtcaagttgacaaccataaacaatatgtgtgcatatgggctcaatcctggtatttcaggttctcgtcttttgggcaccatttctcagtccatttcacaacaaactgtttggaatcaaatggctacagtgagaacaccattgaattttgattctagcaagcagagcttttgcagttttctattgacccttttcggtgaggtatcttagttgtcaaatctggagattggatttcactttttcatatttcttctatt

SEQ ID NO: 49151 - DNA, 264 bp, Glycine max
  Clone ID: LIB3139-103-P1-N1-A7
tttcacaaaaaggcacctatcacttatctcttcttgccactctttcttctctgtgccttaacccactccagaaccacaccacactctccccaaacgacactcctggacgtcgtttcctgcctccaaaacgcacacaatgtcgtcggctttacccaccaccaccctaacaaacaccaacgacaacaagaatcctcgcttctaacgtcgtcgcttggtattcagttacactcccgaggctcaattcagaaatcctcccacagcggc

SEQ ID NO: 49152 - DNA, 234 bp, Glycine max
  Clone ID: LIB3139-103-P1-N1-A8
ctcgagccgaaaaatggcagatattcctcgggtgaagcttggaagccaaggcctggaggtttccaagttaggatttggctgtatgggcctaagtggagtgtacaacgatcctgttcccgaagaggttggcatctctttgatcaaacacgcattcaccaaatgggtcactttctttgattctgcaaatttttatggagcacgttccaatgaagatttggtcggtaaggctctcag

SEQ ID NO: 49153 - DNA, 360 bp, Glycine max
  unsure at all n locations
  Clone ID: LIB3139-103-P1-N1-B5
gcaaggaggaggtccctccctcaatttcctccaatgattacctcatctcttctgacctcacttttgatagctcaccaaggcatcatgtcactctatcatcaacacttgactctgagtacaagagtgtggacatttcggatgtcttgtatgattctgcccagcttgattttgtctttgaacccttccttgaaattagatgagcatgtccttgttttggtttgagatttttttttttaaatttaacctttacttcagcgaaggcagtgcaaaacaaattgtgtaatatatagttgtacttttcttagataaatgttatatccgagcttttgttgtcnaataaaaaaaaaaaataaaataatt

SEQ ID NO: 49154 - DNA, 242 bp, Glycine max
  Clone ID: LIB3139-103-P1-N1-C4
ggctttcacttcgaatctccttcagatctttcagaactgcagccatcttgttagttggggtcttcacgattggatgctagtggtactgttggttgacacttacagctgtacccgcctgtgttctgactctgaggaacatgacttgtgctactattttaacgagtgaccctggtccttaccgtgttttgtttgctggaagagttatctctagaggtggggctgccgcctcattgtgagctcag

SEQ ID NO: 49155 - DNA, 232 bp, Glycine max
  Clone ID: LIB3139-103-P1-N1-D11
cggctcgagctccagccacacaatcgttttcagcacctccaacaccaacagggcgagcatcgccttccataccagggcaggcacccactgtttccactcgaacggctggccctactacaccgcaaacaacattaattcgatcaccctcctaaaccatatcttagacctgatccgatccagagattaaatcgcacctcgcacaggctatgcgaaacttccaacatgccctctg

SEQ ID NO: 49156 - DNA, 142 bp, Glycine max
  Clone ID: LIB3139-103-P1-N1-D6
ctcaacactacatgttttgaacttctcaacaccttatccagccattttggacaccgtttccaggccacacgcttacaggcttcgatggatcacgtcatgtcacgacatgctccaagtctcatgaatgattgcacctgtgaac

SEQ ID NO: 49157 - DNA, 334 bp, Glycine max
  unsure at all n locations
  Clone ID: LIB3139-103-P1-N1-E2
ctttcatggctggggtcatatcattctcatattacctacaaatataagatgcattgggataaagatggagagggaagaaaatcaaggtgctgctgtattggtagaagaaagaacaatggcacaaggaggtggctgaatcttcaattctattgccatacacagcacttttaactgcttcatggagcatggacaacctattgattattattgaattattattgaattatctcaacttacatcaccgctttacaagtatacactatacaggttttttcgtagaaaattcaacatttaaaccttttaaaaaaaaaaccaatctcgatnaaaaagtaaa

SEQ ID NO: 49158 - DNA, 486 bp, Glycine max
  Clone ID: LIB3139-103-P1-N1-G12
cttcgctgaactgaacgaggttctgacaagggagttagccgaggacggatactccggcgtggaagttagggttacgccgatgcgcaccgaaatcatcatcagagccaccagaacccaagccgttctcggtgagaagggaaggagaatcagggaacttacctcggtggttcagaagaggttcaagtttcccgagaacagagttgaactttatgctgaaaaggtcaacaataggggtctttgcgctatagcacaggctgagtctctccgctacaagctccttggtggcctagctgtgcgcagggcttgctatggagtctagaggtttgttatggagagtggtgctaagggatgcgaggtcattgtgagtggaaaattgagagcccagagagccaaatctatgaaggttaaggatgagtacatgatttcttctgggcaacctggcaaagattacattgactctgcagtgagacatgtgcttctgagaca

SEQ ID NO: 49159 - DNA, 431 bp, Glycine max
  Clone ID: LIB3139-103-P1-N1-H12
attcattatatttttgagtaaatagaggaaaaactcgatggaaaaatggtggtttaattctatgttggttaataggaagttagaatacaggtgtgaattaagtaaatcaatggatagtcttggtcctattgaaaataccagtctaagggaagaccctaaaattttaaccgatatagaaaaaaaaattcacagggatttggattatttagaaatggaaggttttttttctagcgatctgaatactgtttctaagaatgatgatgatcattacatgtatgagactcaatttagttttaacaataatattactagtttcattgatagttgcattgagagtttcaatttaggtgatattgacaaatacaatgatatttatttttataggtacatttttttgaagggcagaaattgtagtgaaagcgataattcta

SEQ ID NO: 49160 - DNA, 412 bp, Glycine max
  Clone ID: LIB3139-104-P1-N1-B5
gctttatcatttggcattactaccaccaatattagcaccagctgaatatgattggaatttcgtttgttctctgtcatgctgctatggcttccttatcgaatatcttactgatgttttgtttgttcaatcttctagcatacccagtttcagttcattcagctggtgaagttccaattaatgtgacaaagcacttttccttctataacttcagcttcagcaacaaccccagattagtccatgatgtgaagctcctaggcagtgccaagttctcaaatgaaaagggtgctcttcaaatccccaatgaatcagaagatataagacaccaagctggtagaggcatctattccttcccaattcgcctgctagatccaagcaccaagactccagcttcatttcaaaccactttctcttt

SEQ ID NO: 49161 - DNA, 414 bp, Glycine max
  Clone ID: LIB3139-104-P1-N1-B6
tagccgaatagaaaaagagacaaggaccgtctagaattgatttcattgagtgtagcagcaaccaattccatttccagtttctgattcgtcaaacggacaaaggaagtgaaagggtttagggtgtgacctgagatcaacatgttgcggaggcttctctcttctcacctcaaaaccctagccgccaccgcttcttcttccactccccgatctgcttccgccgccgccagattcgccgctctctctcgctcctcccgctacttctcaacccagtccgaggatgctactgccatcaaaaagaaggttgaggatgtaatgccaatcgctactggtcacgagcgcgaggagcttcaagctgagctcgagggaaggaatattcttgaaatagaccatcccgaaggtccattcggcacgaag

SEQ ID NO: 49162 - DNA, 232 bp, Glycine max
  Clone ID: LIB3139-104-P1-N1-B9
aacatttggtaatttaataaaacgttcttaatgtcggggatttataattgggaacgcccctttaaattaattatctgccttattttacaatgtttttacaacaacaacagtccaacattttatcatctaatgacaaatcaaacccattcctgtaattatcttccaatgaagtatgtgtctaataatggtttgaaatgtggagttctgattgggcaaatcaaacttatgcatt

SEQ ID NO: 49163 - DNA, 188 bp, Glycine max
  Clone ID: LIB3139-104-P1-N1-C4
cataaacagtataaaatattcaaaataggtcaagaaaagtgacattgatgatgtgcctaatctaagttctcttcttgtcttaaaatttcaaatgtacagtttactacacttagacggcaaggtctgagttgctctgattgattgtctaatgtctaatattattggtgcaacagtcacaattagcatgc

SEQ ID NO: 49164 - DNA, 270 bp, Glycine max
  Clone ID: LIB3139-104-P1-N1-D6
cgtaaaaaaattataaaaaaaaaaaaaaaaaaaaaaaaaaaaaaaaaaaaaaaaaaaaaaaaaaaaaaaaaaaaaaaaaaaaaaaaaaaaaaaaaaaaaaaaaaaaaaaaaaaaaaaaaaaaaaaaaaaaaaaaaaaaaaaaaaaaaaaaaaaaaaaaaaaaaaaaaaaaaaaaaaaaaattagggggggggtctttctttgtggactttgttccccgggataaattttccgcgcccccctctttgggcaaccttttttctttataaggg

SEQ ID NO: 49165 - DNA, 415 bp, Glycine max
  Clone ID: LIB3139-104-P1-N1-E2
ggagaaaaagataaaaagaaaaaggagaaagacctaattttgtcactgtaattcttcttcttcaaagaaaaccccaatttcgaacgcttcaaattcaattcaggaaaccctagtgattaatttcgttgcgaaacggcgattcaagattatcgtgagccagaagatggtagcggaagcggaaattatctgtcagcagaacattccgatgttggacgtgaagtatcatatttgcgtggctcaagaacacaacgtgaaggttgaggtttcacccaaatcaccttcacctcctgttccgatctttggccaagtatggttttcctcttaacacctcgctttgaatccgttttttttcttccttttgggtttgcgttcaaccggggttggtacttgtttgatttggttgaacgaattagtt

SEQ ID NO: 49166 - DNA, 414 bp, Glycine max
  Clone ID: LIB3139-104-P1-N1-F1
gaaaaaaccgacacaaagatctagtcctagctagaatcaaacaggggcgatctcaccttcaagaacacatcgccatggcaaggaacttgcttcttgtgctttttgcagtagccaccctcctccatggctcagcagcccaaaccagacacatggtcggtgatgccacgggctggatcatccctgctggcggcgctgccacctacaccgcctgggcttccaacaaaaccttcaccgtaaacgacactctcgtgttcaacttcgccaccggccaacacaacgtggccaaggtaacgaaatcggctttcgacgcgtgcaacggcgggagcgccgttttcaccctgacctccggtccagcgaccgtgaccctgaacgaaacaggggagcaatactacatttgctccgttggatcacact

SEQ ID NO: 49167 - DNA, 339 bp, Glycine max
  Clone ID: LIB3139-104-P1-N1-F4
cgaaaaaatttattttaaaaaaaaaaaaaaaaaaaaaaaggggggtaaattaaaaaagagagggggaaaaaaaaaaaaaaaaaaaaaaaaaaaaaaaaaaaaaaaaaaaaaaaaaaaaaaaaaaaggggggggcccccctcttgggggcttgtccccccgggatttaatttcgggccggttcctgggggggtccccctttttcttttgggggggggttttaggggtgggggaaatcaggggcatgggtgtttcctgggggaaattgttttccgttcaaaattccccccaacatacgggccgggagctttaaggggaaagccgggggggccttaaggggg

SEQ ID NO: 49168 - DNA, 419 bp, Glycine max
  Clone ID: LIB3139-104-P1-N1-H1
ggctccctttttaaccttacactcctcatttcgtttccgtagcagttttctcacacttcacgcgctgcttccccttcacctccgatttcgtatcagtagtcagagatcaaaatgtctcgaagatatgacagccgtacaacaatcttctcccctgaaggacgtctttaccaagtggaatatgcaatggaggctattggtaacgctggtaccgcaatagggatcttatcaaaagatggggttgtgctggttggtgaaaagaaagtcacatccaagctgctccaaacttcaacttccaccgagaaaatgtacaagattgacgatcatgttgcatgtgctgtggctgggataatgtctgatgcgaacatcctaatcaataccgctagggtccaagcacaacgctacacatacgcctatcaaga

SEQ ID NO: 49169 - DNA, 416 bp, Glycine max
  Clone ID: LIB3139-104-P1-N1-H4
ggctgaaattttgactagatgtgtgggcaagtatatggagtgtttacctgtgggagacatagctccagcttttatacaatccacagaacaccgtcccatagcataggtggtggaagttagagagattccagtgatagacctttcataaggtagaaaagaattactcatttcataaattggcaaagcatgtgaggagtggggatttttccaagtaataaatcatggggtaccctttgagattagtagagaggttgagattgtcttcaagacgttctttgagacgagcttagaggagaagaagaaagtgaaaagagatgaatttaatgcaatgcggtaccatgatggggagcacaccaagaacgtaagagactggaaagaggtgtttgattaccttgttgaaaacactgcacaagtcc

SEQ ID NO: 49170 - DNA, 668 bp, Glycine max
  unsure at all n locations
  Clone ID: LIB3139-105-E2-F2A
tctattctttgaaaccaaagttcaaactctgtcttccctgggttctatttcgaaatcaacgacgatgagttccacagaggcagcagccacagagaagaaaggtggaagagggaaaccgaagacttcaaagtccgtttcccgttcctccaaagctggccttcagtttcccgtcggccgtgtcgctcgctacctcaaggccggtcgctacgcccagcgcgttggctccggttcccctgtttatctctccgcggttctcgaatacctcgctgccgaggttcgtcattttcttcctttaattttcgatttgtcttttttgtgtattgtgaccttaatgtgttttggggctttaggttttggagcttgcggggaacgctgcgagggacaacaagaagacgaggatcgttccgaggcacattcaactggcggttaggaacgacgaggagttgagcaagctgattggatctgtgaccatggccaccggtggtgtctgcctaacattcaccagaatttgttgcccaagaaggtcgctggcaaggggaagaccgagaatggatctgctagtcaggagttntagatttaaggctctngttttcgtatgtagttggttgccttatatagtaagaattaggatggacatggatgatgtatagtcctttaacatttgaaaa

SEQ ID NO: 49171 - DNA, 295 bp, Glycine max
  Clone ID: LIB3139-105-E2-R2A
caaaaaaaaccccccccttaaatttttcccccaccccccaaacaaaaggggatttttttttttttttccagaaaacctaaaataattgaaacttttgcgggaccctttttaaaaaaaacttttttttttaaaaatttaaagggcctttacctttccaagtgaaattcttaattttctttttaagggcccccatttcctttgaaaaaaaggttcttgaaataaaaaatttggggatagaaaaccaaatttggtttttccctttgggagaaatttttttggaaaaaaattttttggt

SEQ ID NO: 49172 - DNA, 382 bp, Glycine max
  unsure at all n locations
  Clone ID: LIB3139-105-P1-N1-A1
tccaactctaaggtactcagatatggaccacccttatattttgttgtaaaggattacaactacagtttggaatccaaacacacaaaccagctatgctccattagccactgtgattcaaattctcttttaaatgagatatctagagcatcattagtgccaacatcaagctacatagccaaaccagctgcctcatggcttgatgattttcttgtatggatatcacctgaagcttttagttgctgtcgaaaattcacaaatgactcttattgtccacctgatgatcagccaccttgctgtttaccagatgaagggccatgtgggttgggtggagtgtgcaaagactgtacaacatgtttncgccactcggatttggttaatgatc

SEQ ID NO: 49173 - DNA, 180 bp, Glycine max
  Clone ID: LIB3139-105-P1-N1-A3
gtacaggatttttattttctatgtaggctgataaagacaacacttgtaccgttggaaagaagggtggtgctggccatgttgcttaatttaattcttgcttcctttgaattcttgagttttatcaaaaacaatcaatccggggccgccccccttttttgattcttgccccccgggaatttt

SEQ ID NO: 49174 - DNA, 383 bp, Glycine max
  Clone ID: LIB3139-105-P1-N1-A6
gggatccagatatctagaaacagtgtgataaacatgcacgaacacgaactgggatttggaatgaggagatcactcgacataggccagcgtaatctccgagacgagcgtgcgagacacctgtgggaacatcgcctgtctctaaaaggataaggcactggttgccggcatcttcagggacctcaccaccattgagcagtagagccctgttattgttaagggtgtacacggccaccttaccaaaaaacctgaagaaattggtgctggtgaccagggtcaaatgtttggctatgccactgatgaaacacctgaattgatgccattgagccatgttcttgcaacaaaactcggtgctcgtctcaccgaggttcgcaagaacggtacct

SEQ ID NO: 49175 - DNA, 398 bp, Glycine max
  Clone ID: LIB3139-105-P1-N1-B3
atttagatggaaatctaatcctggattcttctaagatgactgctccctacattaaatggacagtctctttcttcatagcatttggaaatttggctgatgacaccatcaattttgaggcttttccccacaagctggtgcagtttggagagattcaggaaaaagttgtgttgaaattttcacaagaggaatttcttacagcttggtcaactcacgtgcgtcccgcaacgactctgttggctgatgggtgcccatatttgtatgctatggtgcatgatagttcagtgtctacaataccaggtgattttgtcattggtgttaagttgacaaccataaacaatatgtgtgcatatgggctcaatcctggtatttcaggttctcgtcttttgggcaccattcct

SEQ ID NO: 49176 - DNA, 225 bp, Glycine max
  Clone ID: LIB3139-105-P1-N1-B7
caacgacgtcgtccagcatccacaggtcacttaatttactagaaggctaataattaataaatggcgttttcttaagttttagttttactttataaattgtagtataaaactatgttggtatttgtgttcttagttttcttctgctgttttgtctcttctctggctttggtaatttctgttttggacggttgaatgatttcaaaattaggtacttaattacaccct

SEQ ID NO: 49177 - DNA, 400 bp, Glycine max
  Clone ID: LIB3139-105-P1-N1-C9
aaagaagcgaagtgaagttgaagtaagtaaagattaacacagcagtgaatgactaggcaccagattcagattaaaaaaaaaaaaaaaaaaaaaaaaaaaaaaaaggggggccgctcgccctccttctcactcactcactcactcactcactcactcgcaagcaaaaagaaagaatcccaggcgaggagaaagatggaggggaaggagcaggatgtgtcgttgggagcgaacaagttccccgagagacagccgattgggacggcggcgcagagccaagacgacggcaaggactaccaggagccggcgccggcgccgctggttgacccgacggagtttacgtcatggtcgttttacagagcagggatagcagagtttgtggccacttttctgtttctctaca

SEQ ID NO: 49178 - DNA, 91 bp, Glycine max
  Clone ID: LIB3139-105-P1-N1-D3
tgagaacctgttttttttccacgctacaaggccaaattttgtggtgaggacacgatgctttttactatcgttaataagtttgcaaaattac

SEQ ID NO: 49179 - DNA, 391 bp, Glycine max
  Clone ID: LIB3139-105-P1-N1-D5
ggaaatttggttgttgacaccatcaattttgaggcttttccccacaagctggtgcaatttggagagattcaggaaaaagttgtattgaaattttcacaagaggaatttcttacagcttggtcaactcaggtgcgtcctacaacaactctgttggctgatgggtgtccatatttgtatgctatggtgcatgatagttcagtgtctacaataccaggtgattttgtcattggtgttaagttgacaaccataaacaatatgtgtgcatatgggctcaatcctggtatttcaggttctcgtcttttgggtaccattcctcagtctatttcacagcaaactgtttggaatcaaatggcaacagtgagaacaccattgaattttgattctagcaagc

SEQ ID NO: 49180 - DNA, 330 bp, Glycine max
  Clone ID: LIB3139-105-P1-N1-D7
tcgcttcgggcttggttctaacaggggggccttaaattaactcaacccaatgtttttgttgaaggggcaaaccttttcgccatgcaactagccagggcctaagacctccttatggttttaaaataagttctgggcctggatctgttggaaataatacccaaggttgcccctggggtaaacctttccccttccgacattgtttttgggttcccaacacacaaccctgatgcacccgttatgttggaccgaatattgcgcctctgggctggctacaatatcttttttttttcttttcgaactctccttcatggcagggttgaaaggctctat

SEQ ID NO: 49181 - DNA, 405 bp, Glycine max
  Clone ID: LIB3139-105-P1-N1-F5
gggggaaatagcgttggagagggataatgtcagcaatgatcccaagtccatcatgcctgcggcatttgtttcgtttaaaacacgatggggtgctgcagtttgtgcacaaacccaacaaaccagaaacccaacaatgtggttgacagagtgggcgccagagccacgtgacatctattggtcgaatttggcaattccatatgtttccctcaccgtgagaaggttgatcatggctgttgcattcttttttctcaccttcttttttatgatcccaattgcaattgtacaaggtcttgcaagtattgagggaatccgcaaaagagcaccatggttaaatcctcttattgatattcctttcattaaatcgttcattcaaggttttctacccggtattgcattgaagctttt

SEQ ID NO: 49182 - DNA, 400 bp, Glycine max
  Clone ID: LIB3139-105-P1-N1-G10
ggatccccacccacttccggggcccggtaacattggacatgatgaaggaccccgtgaccggttccacgggcataacctacgaccgcgacagcatcgagaagtggatcgagtccgggaaccgcacgtgcccggtcaccaaaacggagttgacaaccttcgacatgatcccgaaccacgccatccgtaggatgatccaggactggtgcgtggagcaccgttcccacggcatcgaacggatccccactcctcgtatccccgtcaccccgtacgaggttgctgacacgtgtacgaggatcttgtcggcggcgcaacacggggacgagaacaagtgcgtggagttggtgagcaaaattaaagcgttgggaagggaaagtgagagaaataagagatgcatagtttc

SEQ ID NO: 49183 - DNA, 396 bp, Glycine max
  Clone ID: LIB3139-105-P1-N1-H1
ctggtgagctttagcaatcagcttcaagttattggtatggttaaaactggggacatgatcaaaaggtggttactatatttagtgcacctaactattgttatcgttgtgggaatatggcatcaattcttgaggttgatgactgcaaaggacacacattcattcagtttgagccagctccaaggaggggagagccagatgtaaccaggagaacgcctgattacttcctatgatactattttggttgagttgctgttaccagcacagcaaccaatgccatgcagtaatgtgcaagctcatctacttgtccaaatcagagccatgaatcatattgatacttatatttttgaagttaggcttcgctggatgtgttatttagttgaattataactgaatctt

SEQ ID NO: 49184 - DNA, 350 bp, Glycine max
  Clone ID: LIB3139-105-P1-N1-H5
ggggagagattcaggaaaaagttgtattgaaattttcacaagaggaatttcttacagcttggtcaactcaggtgcgtcctgcaacaactctgttggctgatgggtgtccatatttgtatgcaatggtgcatgatagttcagtgtctacaataccaggtgattttgtcattggtgtcaagttgacaaccataaacaatatgtgtgcatatgggctcaatcctggtatttcaggttctcgtcttttgggcaccattcctcagtccatttcacagcaaactgtttggaatcaaatggcaacagtgagaacaccattgaattttgattctagcaagcaaagcttttgtcagttt

SEQ ID NO: 49185 - DNA, 364 bp, Glycine max
  unsure at all n locations
  Clone ID: LIB3139-105-P1-N1-H6
ggcccaaacacttcacctcaaagaaaaaaagagcacaaacagaccaattccaacggttgaattttttggctgaagacaccccaccgacgttagtcaaataaaacatgtcttgctccgtcgcggtttccaattcgccggtgttctctccttcttcttccctcttctgctcgaagccctccatcatctcttcttcgccggaatccctctcgctctctctctcgcatctcaaaccttccaactcttctacgacgtcgtcttgttcttcaccctctgctgctgcttcttcatcttcttctccttcttctcccgttcggcttcgccttcccaagcctcccaccgngttctctgcttcttcttctgcttc

SEQ ID NO: 49186 - DNA, 368 bp, Glycine max
  unsure at all n locations
  Clone ID: LIB3139-106-P1-N1-B9
gacagatgtatnattgtttagnacnnnggaaggatgncggacggtgctcatatcgttaatgagccccacgagaaagatttgttagagggaaatttttcctttgatattaaatctcgctctagattggaaaaagtttcctctacaaaagcacaatttgttagtggaaaaaccttcaaatatgatataattggtgctggttcacattcttcaggagattttcctgaaaaggaagatcaagaaaaacccaaaaagattgataccagattgagacaaagaatagatcctcattacaatgaggttcaggctcagatggaaacaaattttgttaaattgtctcttgatgatgttgaaactcctaaaggttctat

SEQ ID NO: 49187 - DNA, 421 bp, Glycine max
  unsure at all n locations
  Clone ID: LIB3139-106-P1-N1-C12
cccannctttcaattactttttacanaacncaannnccccgggggttatttttactacacatattgcatcattccttccaaaatgagcacgcagctgaaaaggttcaactcaatggaacgcaggccaagaatgctgaaggacttcctcagcgagaatctaaactcgtgctcctcaagcggcttcaaatcactttcaagaaaaccaaccaacaacaacagcatgcacagcctcatcgaaatggaactcaaatcttcatcaccctttcaaacactcatgaacaccataagaagcatctctctcttcaccttaaaatcaccctccgtgctttctctaccgaggagcctcttacgcaagctatcatcttcaaggagaaaaacatgaacaagaagaagaaggagccatgtgtgcagcagcgatgtc

SEQ ID NO: 49188 - DNA, 317 bp, Glycine max
  unsure at all n locations
  Clone ID: LIB3139-106-P1-N1-C9
gnaccgatttttagtaatttttcncacnncaaacncaacggggggagtccttttcatgtggagctgtacccccctaaattccttccatttttattaatcaaatacattcaatttcagtttcatgtcatttctgaaacctctttctgggtttacttcccttctcttgtttttttcctttctgggatgacaattttcgtttagagattcctggctgtggattttttctcagaaatgcgtaaagatttcttcttatgactgtgttcagcgtcgaattcaagaatgcgattccgagttaggtgaagctgagatgtgattac

SEQ ID NO: 49189 - DNA, 552 bp, Glycine max
  unsure at all n locations
  Clone ID: LIB3139-106-P1-N1-D11.R2
aacagaaaagatttatgatacagcttgtttttgacgaaaatctcaaccatacagcaaacgctatataacttttgaatgtatcagtactagtatatatgatgaactacatctttagactattagtatatataatattttgcaacagatcgaaattgcaagttcctctctggtttgcagagaacctaagtggtcatcagtttcaccacagagtcaaatccacagtcgtttcgccaccaacccaattgaaccctctttccaacgccggcggtgtgataatcagcgcttccgccatgcagttcagcaactccggcatgttaaacacttcctcttcatcccaaaagaaccttccttgggacgaaaactccgaagaatcatcgtccaaagagaagcttccggagcctgatccctccctttggagttgttgagactctacacaagaaaaatgcttctccgccgcctgcgtcgccgcaaactgaatggccctaacggaacacgtccgcgagttaaggcggagaaacgaggtggcngcgttcgggaagtttaagaagcact

SEQ ID NO: 49190 - DNA, 397 bp, Glycine max
  unsure at all n locations
  Clone ID: LIB3139-106-P1-N1-D6
ccaacccaaaacnaaatcnaaattctcactctcacaaccacaagcgcgggctctctctctctgtctctctcgctctaccaaaaaaanggctttggaaactctcaactcaccaacaacaaccgccccatctttccccttcgacgacccaactattccatgggccaaaagaaaacgttcaaagcgttgttcacgcgaccacccttcggaggaagagtacctcgctctctgcctcatcatgctcgctcgcggcggcaccacccgccgcgtcagcactccaccgccgcaaccgactccagatccttccaccaagctcagttacaaatgctccgtttgcaacaaaagcttcccctcttaccaagcgctcggtggacacaaggccagtcaccggaaactcgct

SEQ ID NO: 49191 - DNA, 393 bp, Glycine max
  unsure at all n locations
  Clone ID: LIB3139-106-P1-N1-D9
gnaaangngtcaggtantttaaagangnaccgcgnaccaagggggcattatttcaactgtgatgaattcaatattgctccaatcgactctagagaagatgggtgttcagactcgtgtacaaacttcagttgccatgcaggagtttgctgaaccatacaataggcagcgggccatcagacatcttgagaaaggaagggttgttatatttggtggcatttggttttggtgctggcactcctcttaactcaaccgacatagctgcagctcttcgtgcttcagagcttaatgctgaagcagttctaaagggtactaatgtagatggtgtatacgactgcaactcacgagacaacaatttcacttttgagcacatatccttcagaaagcttaggtcaa

SEQ ID NO: 49192 - DNA, 233 bp, Glycine max
  Clone ID: LIB3139-106-P1-N1-E12
gcccattagacgtcacatttttacatgagctctactaaaatgtcccttttgtcgtttgttctccgtcaatctttacatgcgggttatttaccctctttcaagattgacaacccccacccatgatttcatttttcaaattcctgccatctatattctatttctattttttttttttgatgtaattggtacgtgcaagaggctacacttatagtttatttcaacattttaccttc

SEQ ID NO: 49193 - DNA, 434 bp, Glycine max
  unsure at all n locations
  Clone ID: LIB3139-106-P1-N1-F5
gaangancaaaangtgngtacatttnggnanncccgagaatacagggatagcattggcctgtgctatgaatagctcttttagggggcgcgccagttctgatatttacaccatctgctctcaagactgtgaattgtggaatcctgcttgcacaaaagcaatgactatgtcatttaatccaaacccgtgttctgatgcatggagtttggaatttttgaagcgtaccggatttcattgtgatatcatttgtgtcactgggtggactgccaccccaatgcaggatgttcaggttacaattgattggtttatttcctctcaggaatgtgttcccagaacctattgtgttttaaatcacaaaaccttttgcgtaaaaggtggatgggaaactgacttttcccatggcactttccaagtgttaaagaatgccttttctata

SEQ ID NO: 49194 - DNA, 436 bp, Glycine max
  unsure at all n locations
  Clone ID: LIB3139-106-P1-N1-G1
caaggctaaggttnttttgtctgttcttgatgagcttcaaggatcagaagatgggtattatgttgtggtcggaggcattactccgactcctctcggggaaggcaaatctactactacagtggggctctgtcaagctttaggtgcttttcttgataaaaaggtagtcacctgccttcgtcaaccatcgcaaggacctacttttggaattaaaggaggtgcagctggtggtggctatagccaaggttattcccatggatgaattcaatcttcatctaacaggagatattcatgcaataactgcagcaaaccaatcttctagctgctgcaattgatacccgaattttccatgagtcaacacagtcagataaggctctttttaaccggttgtgcccttcaaataaaaaagggaaaaggagctttagtgatggcatgttca

SEQ ID NO: 49195 - DNA, 279 bp, Glycine max
  unsure at all n locations
  Clone ID: LIB3139-106-P1-N1-G12
ccagagntttagatgantacaacaagcgaacagnngaacgcgagaaaagagttccaacatgggccggcccccaaagacccaaggatgagaaactacctcgtcgcaaaatcaccgacaaacctaagacgcgcggctgcactattcaccctatggagtgcaatcaagaggcccgacaaaagtgaacaaacccagcgaggctcataatgaagaaaagggacaagctaagctgacaagttggaatcaacccacactccatggaatggactggactggccaaca

SEQ ID NO: 49196 - DNA, 429 bp, Glycine max
  Clone ID: LIB3139-106-P1-N1-G4
tggcttattgtacaggaggacacgaagcggatgacatgttttcttcattgaaaccgttgcatttactgacccgacagaagggcaaagtggagcatgttcaccagcgggcagacaaaatattagaagacattctcagaaagcatatggaaaaacgaacaagagtaaaagaaggcaacggtagtgaagcggagcaagaagatcttgttgatgttcttttgagactcaaagaaagcggcagcctcgaggttccaatgacgatggagaacatcaaagctgtgatatggaacatatttgctgctggaactgatacctcagcatcaacattggagtgggcaatgtcagaaatgatgaaaaatccaaaagtgaaggagaaggcacaagctgaattaagacaaatattcaaaggaaaggaaattatacgtgaaactg

SEQ ID NO: 49197 - DNA, 254 bp, Glycine max
  unsure at all n locations
  Clone ID: LIB3139-106-P1-N1-G7
cacgagccgtaaattgggagagcanagcaccaccaccagcgggggcagnagcgggagaggggggacggcacccccaagaccanggggcaaaagcannaagcgacggcgaaccaggaaagggcgacaacaaggaccccgcaaccacccggcccacagggaaancngagaagaggaaagaagaagaaaccccaaaagcnagacagaacaacgcagcaagaaaggcaagagaaggccaaagaaccgacaaaccaaag

SEQ ID NO: 49198 - DNA, 332 bp, Glycine max
  unsure at all n locations
  Clone ID: LIB3139-106-P1-N1-H3
gcgganccggcatttttatgcgatgaccncacgngnggcaccnncacaagattgtcgagggaagcagggagtacgcagagnacctccacctaccgaggaagaggctcaccgattctggtgctgcgaggaaggagattcaggacgaaactgatagagagacaggacgaaccaaacaaatttcgagtgttcccattcatcttagtatatactctcctaatgttgttaacttgacgctcattgatcatcccggccttacgaaagtagctgtagagggtcaaccggatagaattgtgaaagacatcgaggatatggttcgctcctacatagagaag

SEQ ID NO: 49199 - DNA, 121 bp, Glycine max
  unsure at all n locations
  Clone ID: LIB3139-106-P1-N1-H4
gnaaaggaanccaatttaatacactcccccacnncncgaaccccggcagggtctttatgggggggggcacgcccccaacaccngccaaacccccattaccgcagctcctaaatttggaggc

SEQ ID NO: 49200 - DNA, 442 bp, Glycine max
  unsure at all n locations
  Clone ID: LIB3139-106-P1-N1-H8
gcctacacattcnatantagnnnnggnnnnncatccccaaaagggagtaattaaaattatgggagccaacttttccactttcgagtttgtagaaaaatcatcacactcatcgctggtcctcaccttccattccactgctaaatggaaggctcactttgatgcctccaaagaaacaaacaagctgatggtcatcgacttcactgctacgtggtgtggaccttgcaaatacatggacccaattatcaaagaatttgctgcaaaatacacagacgtcgagttcattaagattgatgtggatgagttaatggaggtggccgaggcttttcaggtgcaagcaatgccaacatttatactaattaagataggtaaagtagtggaaaaagtggtgggagccaaaaaggaggagctgcataagctgattgagaaaccatgaattgagttt

SEQ ID NO: 49201 - DNA, 450 bp, Glycine max
  Clone ID: LIB3139-107-P1-N1-A8
attcggctcgagaattccaataaataccttcctctctatattttcgcacaatagcctctcacccttcaacgatgagttactacaatcagcagcaaccacccgtcggtgttcctcctccccaaggttacccaccgccggattcttacggaaaggacgcgtaccctccgccagggtacccgccgcaaggaggataccctccgcaggcgtatccagcacaggggtaccctccaccctacgcgcctcctcagtacgctcagcctccgccgcaacaacaccagaattcatctggcccaggttgcttagaaggatgtttggctgctctctgctgctgctgtctgttggatgcgtgcttttgagaggagaagaggttgctttgcacaaatttggatttgaaactgtgttttgactttgaatatctgcgttagtttttattattctatgttgatttac

SEQ ID NO: 49202 - DNA, 439 bp, Glycine max
  Clone ID: LIB3139-107-P1-N1-B5
atcgcgagcggccgccctttttttttttttttatatttaaacacactcattgcacatagtaatgcgctttatttaagtgaataaaatattacatactagttcacaaatgcaaaaggacactcatcaaccagatatttgagactcttacagttctcaagaagtcgcgtcagcatagggttagtggcgttagaactcagaatttcattcttaacgccaaaaagaacagccaataaagctactggaaaaggatcaactctagtaagaaaaacaattttcttacctttcccaagtgctgtgcgaatccttttgttgatgtctgaggagcgattgttaactgcagaactaatccaagcagtggtgggtaaaccaccacgtccactaccacatgtaacatttacaacgacagcttctgaaggtaattgacttacaggatagagac

SEQ ID NO: 49203 - DNA, 451 bp, Glycine max
  Clone ID: LIB3139-107-P1-N1-C1
agccggtggaaaccgaaatgggctaggttggggaaagaaaaattgacgactgccctggccaagtccttagatggtggctcaccctcctcggcttcttcaccattaaagtctgctctagtttctcctatgaagagttgttcttcgtctccttgccttaattccattaaaatgctacctccaaacctagaatctttgctcctcaaaaaaggggtggataaaaaggcttcctcatcatcctctcccgtgaaatttgcaagttccgtcagttcacccaaatcctgcgaggaaacttctgatgctgtgacaatagcggatttacatcatctatggcagcttgtggaggagaaagatggaggtctcccttggattcagatgatggatcgttctacccctaccatgagttacaaagcatggcgtagagaaccaaaggatggtcctccccaatatagaa

SEQ ID NO: 49204 - DNA, 285 bp, Glycine max
  Clone ID: LIB3139-107-P1-N1-D3
aaacagtctacagtttttgatattatcttgggaatttctcaagattgtggaattgctggtaatactgttatgccagctttttctgtcccacaggctactgccagatcttgtgaaaatgcggaatcctctgcatgatctggaatttgtgttttctctcgcttgttcgtttgtttaattcaataaaggaaattaggcatgaccctcttgttgagtatgctctgcctatttgaaaatttccacacctcttttaattatcgtaatgatgtgtgaagtgtgtgttatttt

SEQ ID NO: 49205 - DNA, 97 bp, Glycine max
  Clone ID: LIB3139-107-P1-N1-E2
aaaaaaaaaaaaaaaaattaaataaaaaaaaaaaaaaaaaaaaaaagagggaaaaaaaaaaaaatgaggggaagggaaaaaaaaataaaaataaaaa

SEQ ID NO: 49206 - DNA, 365 bp, Glycine max
  Clone ID: LIB3139-107-P1-N1-G11
gattactgttgattatttttccattggaaaggaaacaagcggaaggcttttaatgggagcggggaggttccctttatcatcatttcttgtccaaaacaaggatgcttctatttcatctcttccatttgatgagttgattgataattcttatggatttgcatgattatttcctgaacacaaatattaaattgttaaaaggctgtaagagatgaaacatatattttgaattacaggagattttgtaaactataccccttcattaaagaaatcatatattggtattttctgtttccgttgcttacatatactattttaaactctttttatattttccttacttaacctttttcttaatgttattatta

SEQ ID NO: 49207 - DNA, 283 bp, Glycine max
  Clone ID: LIB3139-107-P1-N1-G6
gtctgcaatcacctcctatattgttgagtgtagtgaggcaatcaatgatggtcacggactcatggtcggtacaagcaccttagtgttcaatattgctttcgggtgtttcattaacactgaagataaattttaagacaacatttgatacccctcgaacaacggtgcagtttattttaatcagtgtgtcatgtccaaaagtttgctagcagatgtgtattagtgtttgatgtgtacaataatacaagatatcattactctttaaaaaaaaaaataataaataaaa

SEQ ID NO: 49208 - DNA, 328 bp, Glycine max
  Clone ID: LIB3139-107-P1-N1-H10
tgaaaaaaaaaaaattattttataaaaaaaataaaaaaaaaaaaaaaatggaaaaaaaaaaataagggagaagagaaaaaaaaaaaaaataaaatataaaaataatataaataatattaaaaaatatattaataaaaataaattaaataaatatataaaaaaatgttgtcttcccctcctttttttatctcccccccctatattaattttttattccttcttctttatgtcttctccctttctttattatatatattatttttaacttcgttttaaatttgaataattctttttctcttttaaaaatttttttttctttctatttttt

SEQ ID NO: 49209 - DNA, 366 bp, Glycine max
  Clone ID: LIB3139-107-P1-N1-H6
gcacgctcaatggcaaggtctatagctatagatgatgcagtagaaggactggcacccacgcgtagctgtggaactgttcttgccaagggagaaaatcgtgcaccgctgtccattttgaactcgaaccgtgatccttgtgctaagaatgataggacccgagcagctccactttccatttataaagattcagctgacactggtgatactgatcctcataagccagacctgtcgcactcttggcacacacttggagctcgagctgacagaaataaggaaaacaatgctattcctggcaagtggaagtgctatatgaattcacagcgacctgggacttataactggaggggctactgcaagtgcctttta

SEQ ID NO: 49210 - DNA, 343 bp, Glycine max
  Clone ID: LIB3139-109-P1-N1-A12
ctcaagccggtttttagttattttctacactatattttaaggacaattatacatagacggtagggggtttattactactaaccaaactcaattgttgtttaaaattgtcatcctatattgacatttttaatcatccccatattatgatttattgaattcttattattaaaaccccttttatcccaaatagaatcctaactttgtttttcaaatgtttctttcttagaatcatcttacttctgatttgcttgaaaattttattcttaataacctaaattcctctatttgcactccagaatgaataaattatttcatttcaatatctaaatttcatgattattat

SEQ ID NO: 49211 - DNA, 95 bp, Glycine max
  Clone ID: LIB3139-109-P1-N1-C12
aaaaaaaaaatttttattattaaaaaataattacaaataaggagaggataataaaaaatgggcggggtcgtcaaaataactaaatcataaatttc

SEQ ID NO: 49212 - DNA, 440 bp, Glycine max
  Clone ID: LIB3139-109-P1-N1-C2
tttgtttataaaaaaattggaaaaggaaaagtgagggaaggtaccattgggggaaatgaagaggggcggggatttggaaaaaagatcagagattaaatctgcaattgaagagttgtctatgctggttatagtcaaacctgaaggaaatcatgtcatgattgctcacatccccaccaagcctttcctgtctctatgtcacttggttctacaagttcttgataagataggaccaacgatggccgttttgagacaagacgtttcccagaatattaagaggttggaagtgatgcatgaattgaatccctcaatgaattcaaatttggttgaaatattgaaatcagaagctagcaaaggcaaatcaaggaagaggtctagttgtagtaaagcctttctttggctcactaggtccctggatttctcctcagcattgttaaaatcac

SEQ ID NO: 49213 - DNA, 437 bp, Glycine max
  Clone ID: LIB3139-109-P1-N1-F2
cacacatatggttaatgggctcaatcctggaattcaaggttctggtggtttgggcaccattcctaggtcgatttcacagcaaactgtttggaatcaaatggcaccagtgagaacaccattgaattttgattctagcaagcagagcttttgtcaattttctattgaccttctcggtggaggaattttagtggacaaaactggagattggatcacacttatacaaaattctccaattagtaacttgttgagagttgctgcttggaagaaaggttgtttaatggtcaagattgtgatgtctgggaatgcagcagtcaaaaggagtgattgggcctcattggtacaagtgtttttaacaaacagcaacagtacagagcattttgatgcatgtaagtggacaaaatcagaaccacattcctgggaattaatcttcccaatag

SEQ ID NO: 49214 - DNA, 70 bp, Glycine max
  Clone ID: LIB3139-109-P1-N1-F8
aaaaaaaaaaaatttttttaaaaaaaaaaaaaaaaaaaaaagaagagaaaaaaaaaaaaggggggggggg

SEQ ID NO: 49215 - DNA, 303 bp, Glycine max
  unsure at all n locations
  Clone ID: LIB3139-109-P1-N1-F9
gtaaagggggatcatactaactttgaaattgagtcttctgttggggtggaagcttcaggtgtggaggctgatntgaaatacatcactgtggatgagtaccttaatcagtttgtctaaggtgcaaagcctagctgataagtttgtttaattggtaaaactttgttttctaaataaagagaatcatgtagtaagactgaattgctgcatgtgctcctcaaaagaacaatgtatgaaatacctatgctatgctatatgctatgatacctttattacatgcatattggtgtcatcgattttaatttt

SEQ ID NO: 49216 - DNA, 241 bp, Glycine max
  Clone ID: LIB3139-109-P1-N1-G6
ctcgagccgaatcggctcgagaattgtgatcgtgatgttggtgatggagtccacagcaagaagacctgcttaaagcttatgtggagtttattttatcttgtagctaatgcagtagtataggactatatataggtttttattatagggtatccttttgtgaactcaaagacctcgttttcaggggattttctgtttgatgtccttaaggattatcaattatgttatatatggtcttggatac

SEQ ID NO: 49217 - DNA, 365 bp, Glycine max
  Clone ID: LIB3139-109-P1-N1-H1
gggatttccatggaagtttcaaaagaagaagctcgagtggcacccgcaccggccctagtggcgatgctgccatcccctggcatgggccacctaatcccaatgatcgagttcgcaaagcgagtggtgtgctaccataacctggcggtgagcttcgtgatccccactgacggcccaccttcaaaagcccaaaagcagttctggaggcccttcggactaatttccacaccttctcctcggcaatcttcgcttccgcggcacaaacaaacctgctcacacgtctcgtccttcttcctcgcagattcatccttcgcaaacaccttcgcgcgcgtagacttttcacgcgctcacgcgcgcgattaagctcc

SEQ ID NO: 49218 - DNA, 424 bp, Glycine max
  Clone ID: LIB3139-109-P1-N1-H6
agatgctcattacatatagctatgaaaaattactgcgccaggctaaagctccaagtatgtttttacaatccttcaaaaattttgtttctttgtgtgtgtatggtgatgataacttaattagtgttcatgaatatgtcaagccttactttagtggttctaaattgaaaagctttctagctggtcataatatcaccattactgatggtattgacaaaactagtgcaactttgcaatttagaaagttagcagattgtgattttctcaagagaaactttaagcagatgtctaatgttttgtgggtggctcctgaagacaaggcgagtttatggtcacaacttcattatgtttcgtgtaataatctggaaatgcaagaagcttatcttgtcaatctcgtaaatgtgttacgagaactgtatttgcacag

SEQ ID NO: 49219 - DNA, 303 bp, Glycine max
  Clone ID: LIB3139-109-P1-N1-H9
gtaaagggggatcatactaactttgaaattgagtcttcttttggagtggaagcttcagctctatatcctgatgtgaaatacatcactgtggatgagtaccttaatcagtttgtctaaggtgcaaagcctagctgataagtttgtttaattggtaaaactttgttttctaaataaagagaatcatgtagtaagactgaattgctgcatgtgctcctcaaaagaacaatgtatgaaatacctatgctatgctatatgctatgatacctttattacatgcatattggtgtcatcgattttaatttt

SEQ ID NO: 49220 - DNA, 443 bp, Glycine max
  Clone ID: LIB3139-110-P1-N1-A10
ccccaatcgtagccgtcgcactttgcgttttctgcgtcatctccgattccccgacaatggccacccaaatgagcaagaagagaaagttcgtagctgatggagtgttcttcgctgaactgaacgaggttctgacaagggagttagccgaggacggatactccggcgtggaagttagggttacgccgatgcgcaccgaaatcatcatcagagccaccagaacccaagccgttctcggtgagaagggaaggagaatcagggaacttacctcggtggttcagaagaggttcaagtttcccgagaacagtgttgaactttatgctgaaaaggtcaacaataggggtctttgcgctatagcacaggctgagtctctccgctacaagctccttggtggcctagctgtgcgcagggcttgctatggtgtcttgaggtttgttatggagagt

SEQ ID NO: 49221 - DNA, 399 bp, Glycine max
  Clone ID: LIB3139-110-P1-N1-B3
gtacagcacaacaacatcttgtttctgactacggaactaacagtcgaacacttgtctacaagccgatggaggcggacgcagaaagcctattcaaacagggaaccaccgagagcgagcggtggctggagaagccggtgatcgcactcggagtcttcctcatgctcgtatcactcgccggcctcgacagaacgcgctgtcgcgcgacgtggctcctctggctctacctcctcgacatgttcgcactcataatccatctgttcagctctcaccaacttcgcctgcgatgacaccaacaagggcgctggcaaagatgtgtctaatagagaggataaggcagataggcttgcggatgactccaacgggatgcaaaagagggtgaacaacactaatacgtggaac

SEQ ID NO: 49222 - DNA, 305 bp, Glycine max
  Clone ID: LIB3139-110-P1-N1-D11
ctccaagaaccacggctccaaggcctccaagcactccgaggagtgcgagtccacccaccggcagtcggactccgagtcctcccactctgaggagtctgaggagtaagcggctcctttgtcgcttctcccgcgacggctccggccgccaggcgagttttcttgtataaaatatgcttccgggggatcggcgacggtcccctagaacacccggttttcgagttcgctgtttggaggtgttggataggactggatcatagacaatttcctttgagtgtagcgatttgaattgaaagattattatgttc

SEQ ID NO: 49223 - DNA, 84 bp, Glycine max
  Clone ID: LIB3139-110-P1-N1-D4
gcatgtcagactaaatggaatcctgtcattgctctgaatgttttttttgtgaacagcttgccaatgaaattacccttcccgttt

SEQ ID NO: 49224 - DNA, 81 bp, Glycine max
  Clone ID: LIB3139-110-P1-N1-G8
cgcttacctgattttgtttggttattattccgactcctatggctggaaatgataaatcgaggcggttgttcatacttttta

SEQ ID NO: 49225 - DNA, 308 bp, Glycine max
  Clone ID: LIB3139-110-P1-N1-H8
gacttacttcataatgtatattaaacttcccattgtatgtggtgtggtatcaaaatccaattggggtgtttttcttatcccatacatcacgggcaccattttgatgggagcttcaataaatattgtataagttttaagaattttaggccagcattcttttatactattttgtattacaaatttgtatatgaccaagtgactggcatgtattatcaagctactcaattacctactggtgtttgtggccgtttgaaattttcccacgatgtgagtgtttgaattcaaattagattatctaaatttttgtt

SEQ ID NO: 49226 - DNA, 186 bp, Glycine max
  Clone ID: LIB3139-111-P1-N1-A1
gtgtttatgtgtttcaccttggtgcatacatcacattatggaggaccaaaatggtagtgataagtggtgccaatggctaattgaggtgaatccatacctagctatattgtcctttcagtttttcttcttaaggatgtatttcatcactatggtttctctcaagcatggtatgaattattgaatact

SEQ ID NO: 49227 - DNA, 114 bp, Glycine max
  Clone ID: LIB3139-111-P1-N1-B5
caagtgatttatctagtcaatgttggaggttgggttcatctatgacctgatgtgaattaggctgccacaaattttataggacgatggctagagcctagaaggttttttagggtc

SEQ ID NO: 49228 - DNA, 191 bp, Glycine max
  Clone ID: LIB3139-111-P1-N1-C3
acagattctttcattgaaatttaaagccataagaaattatagcaaaatcatcatgtattctaagagatccacgagtgttgttgagcatttagcctcaacacatatgtaatgagtcaaatgatgtaagaatagagattgctcatgaaaaagagaccatttctggaaaaaatataaaatatattaaaatattg

SEQ ID NO: 49229 - DNA, 256 bp, Glycine max
  Clone ID: LIB3139-111-P1-N1-D1
gggaatctctcaagattttgaaattgctggtaatactcttatgccagctttttctgttccacaggctactgccagatcttctgaaaatgcggaatcctctgcatgatctggaattcgtgttttctttcgcttgttcgtttgtttaattcaataaaggaaattaggcatgaccctcttgttgagtatgctctgcctatctgaaaatttccacacctcttttaattgtcgtaatgatgtgtgaagtgtgtgttatttt

SEQ ID NO: 49230 - DNA, 185 bp, Glycine max
  Clone ID: LIB3139-111-P1-N1-D9
ggtatatgaagaggacgaacttatttttttccgagacctgatttaatactagcgggaattttatggtaaagtatccacgtgtgtatgatgatctgcgggtttttggcatcgaattgaagttgcattgaacaagagagtatttgctgtggaaaagataaaaataaaaaaaagggggcgccgactag

SEQ ID NO: 49231 - DNA, 82 bp, Glycine max
  Clone ID: LIB3139-111-P1-N1-E10
atggtatagtgcgtgttactccatttttgctgatgaataaagtgagatacattattgaatgaaatattcttttttttttgtt

SEQ ID NO: 49232 - DNA, 314 bp, Glycine max
  Clone ID: LIB3139-111-P1-N1-E8
tagtactacaggattaagctcttttagtttgatgtgtgatagcactaagttgataaaacatctcataaaagccaggatcgtagattactggtaagaagctaaggagtcaattttaagcgaacgacagtacatgtcacataatcgttgagattagagtttgctctgttctctgctgtatgcataccatatccataatgttacggactgtcaatgtggatcgtgcattcattatgcacgctgaaacaagatgcgattaattctgtgaaaataagtatcatctctctggagtgtaaaggagtacattgttatagggc

SEQ ID NO: 49233 - DNA, 397 bp, Glycine max
  Clone ID: LIB3139-111-P1-N1-F1
gagacgacctttcccggaatgcagctgagtggtaacatattgaggaaattggagttcctgatggccgatgccattgcgcaaggcgcctactgtatcatcacaatcgggggcattcagagcaaccactgtttcgccaccgtcgttgccgcctagtatttaaaccttgactgttttctcatcctccgcacttctgacctcctcgtcgatcaagatccaggacttactggcaatctttttgtcgaacgtatggttggagcttacgttcacctcatcttcaaacaagaatatgccaaaattggcagcgtgacactcaccaatgttctataagaaaaattgattaaggaagggaagaggccatatgttatacccgttggcggaacaaactctttgggaacat

SEQ ID NO: 49234 - DNA, 534 bp, Glycine max
  Clone ID: LIB3139-111-P1-N1-F3
cttacatatgccaaagaatgttcagtggctttgacttgaaaacttctctgtcaaatcagacaatattactgtaactaaagagagcttctttcaccagtttctcgcattaagagagatggatcccttggacatgctggggcaaaatccagattccatttttgggaaattttgcaggagcaaatacttggtggtagttcatccaaagatggaggcatcattcttcggaaatttagaccagcgaaattatgtgatgggtggagggcatccaaggacccctttttaccaggcttttcttaaactgaccaagtcaattttgcttttacacaggttggcttattctttcgagccaaatgttaagtgtatttcaggttaaaggagggagtgagttctctgatgtttatatggaatgtgtggtctagaatttgattatggatgacattgatgataaacctaaagtcggtttgatggatattcctggattctggattggttgaagtgtgattcaaagtaaattttttttttttttttaaggtg

SEQ ID NO: 49235 - DNA, 409 bp, Glycine max
  unsure at all n locations
  Clone ID: LIB3139-111-P1-N1-H1
gagagagatgcanaatatcttccgtttcaggattagggtttcaccgttacagtgaaacatgtgagaaccaaaacgaatctatctgcgtatctttgcgctgctcctcttcatttccgcctcttcgtttcagcttctccgcgctttcgatgacgcgatcttttacgagtcgttcgacgaggatttcgaagaccgttggattgtgtctcagaaagatgagcacaatggtgtctggaaacatgccaagagtgagggacatgatgattatgggcttcttgtcagtgagaaagtaaggaaatatgctatagtaaaagaacttgttgaggccgtgggtcttaaggattgaacagttgttcttcagtttggaaactcggcttcaggaatggttttgaggtgtggggtgcatatttta

SEQ ID NO: 49236 - DNA, 92 bp, Glycine max
  Clone ID: LIB3139-111-P1-N1-H12
acatgaccctcttgttgagtatgctctgtctatttgaaaatttccacacctcttttaattgtcgtaatgatgtgtgaagtgtgtgttatttt

SEQ ID NO: 49237 - DNA, 366 bp, Glycine max
  Clone ID: LIB3139-112-P1-N1-A7
aatcgagatgtgaggatttagtacgtgttttgagaactgaattccactactatgctaccaaaaccgtaagtacttgttgtacagaaaataagaaatagtcagaattgaagcaaaataataatttttaatttagtaatcaacgtttgcaatgttcgcagactcagtatctaaccagggctaggaagcatcctggtaaggagatactctgcaaacaagcacattctgaaacacaatgtcatcaaattctgtacaacaagtacttacggttttggtagcatagtagtgggatttagtacgtgttttgagaactgaaatttggatattagaacattatgttgggacacaaataatctagcacatgtcctc

SEQ ID NO: 49238 - DNA, 399 bp, Glycine max
  unsure at all n locations
  Clone ID: LIB3139-112-P1-N1-B1
ggaggcaccagaggtattggagccggnngccagggttgtgagagtagaccactgcgaccgagttcatgtaatcgtagccgcaaagcgtatttgtattgctaattgtcgngaatgtgntttctttnnntgagtgaaccagcaacctcttattcttggtgataaccataaactgcaggtggctccctataatacattttactcccaattgggagagcatatgaatgaagttggaattgtgcccacagttaaccgatgggatgagcctctagcattgggcatggttgatccccatgattcattatctcatccaacgggtgtctctgatgttcaagctgagtctgctacacgtgtggaccctgatcaagtcactaattttgtgattccaaattggtttggagc

SEQ ID NO: 49239 - DNA, 462 bp, Glycine max
  Clone ID: LIB3139-112-P1-N1-C1
cctgctttcttccttcacccctctaaaaatcacaaatattctaccttttgatgcaaatgggatcaacccaccaaccctagggtcacataccagcaagattcattctttcattcaatctcaaaccaaacaacccccatttcaattatggcaccatttcccacttcccattacttcagggccttcactttctccattttgttcctcaaaaccctagcttttgacccaattcctctgttttcctatgctggctttggaaaagatctgaaatttaagcccaacgtggccctttttggtaatgcaaaggttctcaatgaagggtctgggattcatttctctggctttgggagttcaagaggcactgggagaatcatgtacaagaaacctatcaagctttctcaaggtaaaccaaggcaattagtgtctttttctacttactttgcattttcagtgtccttggaagat

SEQ ID NO: 49240 - DNA, 271 bp, Glycine max
  unsure at all n locations
  Clone ID: LIB3139-112-P1-N1-D6
tggaattctgaggtcttaccgcccttaaccttatgttgacccgcctttttgggacctgtaggagtctcaattttctggtggaggaggtgtcctttggcatttgtgacctagtttgtaatatttttttaacttaaataaagcgcattactatgtgcaatgaggtggtgtttaaatttttaaaaaaaaaaaaaaaaaaaaaaaaataaataaaaaattataaaataaaattaaataaataaaaaattttnttattaaaatttatggggggggc

SEQ ID NO: 49241 - DNA, 277 bp, Glycine max
  Clone ID: LIB3139-112-P1-N1-F5
aaattaccgggccaggcttggggctccagtattgttttaccattcctccaaaaatttggttccttggggggggaatggcgaggatacctaattaggggtccatgattatgccaggcctaccttaaggggttttaaatggaaaggctttcaacctggtcatattatcaccatacctggtgggattggccaaacctggtgcaccttgccatttaaaaaggtaggagaatggggatttcttaagaggaaccttaagccgatggctaatggtttggggggg

SEQ ID NO: 49242 - DNA, 350 bp, Glycine max
  Clone ID: LIB3139-113-P1-N1-A7
tgatctcctatgatcagacttctatgtacccatccctccttgcttgtattatataatgcatccacacaatgcaaagattgatccatgtccaccaccggatctacaacctctgaagctagcatcaatgagagtaaagtcatacacataagcgagcaatatgatgatctcattcgcaggatgcccatgctagtcagtagacacaggagcatattctataatacctgcattgtagtgtctagtccccattgcacctacactaccttaacttggaatttccgttttgcgccactatttaactccgactatatacattggatatagcatgtgagtgattatgcgtgttctatata

SEQ ID NO: 49243 - DNA, 399 bp, Glycine max
  Clone ID: LIB3139-113-P1-N1-A8
ctccttcccaattgtggaccactacaaacccaggcgacggggctgggcttatgagaaacgtccgcccccatagctgaaagtagatgccttcaacaacaaaggtccacataaactgtctgatctctttgcctacacctcttgcttgaggtactacactccccagacttttagtgtagcaaggtcgtgatctagcttcagaagatgaaaaatgactgctataggcgaaagggaatgggctcaaatacaaaggaagaccgtcagcacaatctgatttgctcttgctcccatgatcaagtgcaaggcagagtgcttaaggagatcacacccatagccttgcgggagaccgggttttgacatcactccacattttgctcggagatggggtagtatcaactcaaa

SEQ ID NO: 49244 - DNA, 338 bp, Glycine max
  Clone ID: LIB3139-113-P1-N1-B10
caattacttgttactcgcgtagagcacgggcagcttaaactgtctccatgctgatcaacgactccttacttaaacaacaacggtgtcagacaaacggtgccggatgttggtgccgccacgctattacgctaatctgatacatcaccctcataaaaacccatcctttctcttaatatataaaccctaattcagaagaaaaaagtcaccttctccagaatttgcgcggtaataggaatattctttagactcatggatgaaagaatatattgtagctgtgaaacttgctgatgatatcactggcatgattttctgtatcgtaattcatttcctgcatttgg

SEQ ID NO: 49245 - DNA, 229 bp, Glycine max
  Clone ID: LIB3139-113-P1-N1-B3
ccaaatagttaactacgtaatggcttctcttctctctctctctctctcttcatagtactctatttgtaaagtaatatgcgtgtatagtatagcatctttttctactactactagacatgcaggtcgagttggaaaaatttgttatttgcaaactcttttgtgggggattgacttcacaagctccccaatgatcgaatccctgtgtgaatataattatgccttttggtct

SEQ ID NO: 49246 - DNA, 328 bp, Glycine max
  Clone ID: LIB3139-113-P1-N1-B8
gagtaagttcaggaaggcgttggttctttgttggattggggcgtccttgaacctgatttacaaaagcatactcagacgataggatacatcagatttcgtgcgccaactatacaatgaagatcaattgcaaaaagatgatgtgaacttactcaattggagtgggctgccctcccaggggcaggagcaacaccatggccgtgattctataaatatcacttctctcttgccacgcattaaccccaacagttcaatcgcctgtctcactcgccgaccaaggtcagattttaggtctctgccctcgctgaatacgagcttctgtatcataatc

SEQ ID NO: 49247 - DNA, 329 bp, Glycine max
  Clone ID: LIB3139-113-P1-N1-C9
ggtactttcggacccattccacctctacaaacagcccatagtcaaactgagccatggtcacaatcataccaggactcgtgcagtgtctcgggttgttagggcatctacaaagaatccgacaaacctattttttgatggtggaagatcttcaaccaaatcaaatgaatcgtaataatacgtcgctacgtaaaatatgtaatgcacaatcaagacttacaacttgatctggcaaatcacacacacttcatcgcagatttaacctgtgaggtacggagagcactaccacaccaatagctccttgacacattcttttgcgcatagggcacttt

SEQ ID NO: 49248 - DNA, 244 bp, Glycine max
  Clone ID: LIB3139-113-P1-N1-D12
ctaagtttgtcatggtaatgcgactgcagagataaaaggtttaaaggtttaaaattaaatgcaccagccgggaatcgaacccgggtctgtaccgtggcagggtactattctaccactagaccactggtgcagtttgcttgtattccatatcttttgtatatattcaaaacaaaacagtggcgtaaagttaattgatcacttattaaaaaataaattttattaaaataaaaatattataaattag

SEQ ID NO: 49249 - DNA, 302 bp, Glycine max
  Clone ID: LIB3139-113-P1-N1-E9
ggtaatgggagtagggtaagagttgtggttgttgcgctgtgcccactatgtggtttcaacactgtatggtaaattgactgtcagcgtgcttgcgatgtccccactgtgaatgttgcaggtgttgacgctgctacatggctggagaagcgagacccctatgagctaatcactttttgttctcttggatgtatcaaagggcaaatctaatgacttgttggcttacactgattatgatgctgaggttactaaaatctgtggtgtcaacaggtctagcatttaagtcgcctaggcctaattgtctt

SEQ ID NO: 49250 - DNA, 401 bp, Glycine max
  unsure at all n locations
  Clone ID: LIB3139-113-P1-N1-F8
cgagttcgagtgtacgaggcacactggctagtgtctaggcatgtgtgtgagattcctaacgaggaactataatntattgggagagcacttgagtttttgcggacaattggtttcgattcatttgggtttggaaaactctgatttcacaattttttttttaccaatttttaatataaaagatatttctaggagcgcaactgtttgtgctcattcttatgcagcatgccaagtcctgatatgagatttctgaggccgattggtgaagaattatatattaaattagaacagattacagctctggatgaattaatgacactgatgagatttcttctttctgtattaattatttctctggatttgatcacgaaacattgaatagaattgtgaaccttgtttctttg

SEQ ID NO: 49251 - DNA, 193 bp, Glycine max
  Clone ID: LIB3139-113-P1-N1-F9
gcatgaagctgtcctataacgcttctggactgtggatgtcttgggataagagtgacattgatcgtgtggagcaagccattatcatagcgctgtttgccgtggctgaatctaagtgggtgagccagcgcgctctttaggtcgcaacctccaattagggctctccagagctgtttgattattgccctggagaact

SEQ ID NO: 49252 - DNA, 169 bp, Glycine max
  Clone ID: LIB3139-113-P1-N1-G10
gtatatgaatgaggtggttatgccacatctgtaggcaaagggccattaccagctgtacccacaaggcgaacatgcagttggtagaggactaggagcaagattgatagatctggacccttaaccttgcgaagtcttgacagaacctgatgctctaggggcttcggtacca

SEQ ID NO: 49253 - DNA, 219 bp, Glycine max
  Clone ID: LIB3139-113-P1-N1-H10
atagagctctagcttcttcgaaagccgaaccttaaacacaaacgccaaatctagcaactattgagcttttgcttcttcggttgttagctttgtattcaaattccataaacatcatgtgcacagttccccagaagatctaacaaggatctccactaaggcaaacctcagttccaactgtgtttgtatacctctcacctactttaagaccatacccatatt

SEQ ID NO: 49254 - DNA, 403 bp, Glycine max
  Clone ID: LIB3139-113-P1-N1-H12
gaagataacaaaacaaataagagcagtagagagagaggaaccatcaccaaccctaatttcttagctaaaccctattcgattagcatttcctctcttttcttccactcgtaaatcctctcccaaacttttcagatccaaataaatcatggttttctgggtttttggctacggttcactggtggggaaccctggattcgattacaatgagaaggattttggtttcattaaagactacagacgcgtgtttgatttatcgtgcattgatcaccggggaacaccctgaaaacccagcaagtacttgctcgttggtagagaaggaagggagtatttgctggggaagctgttattgtgggtcaatgagggcccgtaaagagaaaactggctttgtcaatcttttgagcga

SEQ ID NO: 49255 - DNA, 378 bp, Glycine max
  Clone ID: LIB3139-113-P1-N1-H4
cattaccagctgatctcgtcaagagaggattggcaattgaagatccctctgcaccccatggccttcgccttgtgatagaggactacccttatgctgttgatggacttgaaatatgggatgctattaagacatgggttcatgaatatgtctccttgtattacccaacagatgcagcagttcaacaagatactgaactacaagcatggtggaaggaagctgtggagaagggtcatggtgacttaaaagaaaagccttggtggcctaaaatgcagacaactgaagatctcattcaatcatgctctattatcgtttggacagcttcggctctccatgctgctgttaattttggacaatatccttatgggggcttaatcctga

SEQ ID NO: 49256 - DNA, 457 bp, Glycine max
  Clone ID: LIB3139-114-P1-N1-A11
ggaaaaaaaaaaaaaaaaaaaaaaaaataaattttaaaaaaaaaaaaaaaaaaaaaaaaaaaggaaaaaaaaaaaaaaataaaataaaaaaaaaaaaaaaaaaaaaaaaaaaaaaaaaaaaaaaaaatataaaaaaaaaaaaaaaaaaaaaaaaaaaaaaaagggggggggcccttttataaaaaatttggccccccccccctttttatttttaacccccttttttttaaaaaagggaattggggaaaattttttttcaaaaaaaatatttttttttatttttaaaaaaacccctttttttaggggggggggggggattttttgggggccccccttttttatggggaaaaaattggggacagggggggggccccccccccaagggggggggtgggggtaaaaaagtgggggttttttttctataaagaaggggtccccaaaacttttgggttttaaa

SEQ ID NO: 49257 - DNA, 224 bp, Glycine max
  Clone ID: LIB3139-114-P1-N1-A4
ggcacacaccctctacctctttaatctatatcccaaacccattggcgtggtcgcagtcgcagtcaagggccaaggcaaaaccttaaatggcttaacactttcgtcggaatccgtttttggttttttccgggccaggatgccggcgaaggacgacggttccgccagggagaggggcttggttctttttttgaaaatcggttaaaacaagcgcaccgttaaaacca

SEQ ID NO: 49258 - DNA, 58 bp, Glycine max
  unsure at all n locations
  Clone ID: LIB3139-114-P1-N1-A9
ccgaagatgacgaccgatganggatgacgacatatgttaaaggtgatgccatctggta

SEQ ID NO: 49259 - DNA, 178 bp, Glycine max
  Clone ID: LIB3139-114-P1-N1-B3
ctatctcgtcgcgaaccaccagcaaattttttttgagactgtttaccggccctttgaggttccactactacacaacctcgacaggtggcaaactgttatcgacgatgaggaggagacatccaagcaaaaaataaaggcccaaagcagggaaattaagcgtctggaaaaggaaggcctg

SEQ ID NO: 49260 - DNA, 295 bp, Glycine max
  Clone ID: LIB3139-114-P1-N1-C6
ggctgaccttcgggttccttccgctaattccttttttttgcacctccttttcccaagagggaccttaaaatcgacccgtcctggtttggttcgaggacttcgccataaaatcctttaattctttctttttaaactccttcaaatctgggggtttcaacttcaaattcaacctggaaaccaaccccaaaatggccttcaaaaaatccggccagaccctttccaacgccttaatttttttttccccaacaatggaccgtttgggaggtcccatggccccggttgcaattttggattt

SEQ ID NO: 49261 - DNA, 360 bp, Glycine max
  Clone ID: LIB3139-114-P1-N1-D4
cttggggtaatgaggtcctgggtggtggcataagtggttcaattaaggtggtttcgcaaattcggactttgcaccatgttttgggtggtccacttaacccgaatgctgcatacctattaatcaaaggcatgaaaacgctgcatctccgtgtccagcagcagaattcaacaggaatgaggatggccaaactttaagaggcacatcccagggtgaagcgggtttactatccaggcttgccgagtaaccctgaacatgagctggccaggaggcagatgactgttttcggtggtgttgtcagttttgagattgatggagatctacatacaacaataaaattaattgattcattgaaaatcccat

SEQ ID NO: 49262 - DNA, 369 bp, Glycine max
  Clone ID: LIB3139-114-P1-N1-D5
ggtcgaacccgcggaatttcatcactaaaatcactcgatacgacagggttgtcgacattcccaactccatgaccatatgggacaaggcttttcccaatttcgttgaaaatggccaaccggaccctaattggaatctggaatttaaccaaccttgaagtctaaggtaacaccaggattttccagatgtccaaggattccgtgaatccgaccttaccatggaaaaccttaattttggaggaccagcctaaggtgatggtggcccttaaaagcaccaccaagctggccgcttttaagtggaaaaaggagtttcttaaactttggtccataaaaaactccttcgttaagtatgattccaagccaaataagaaa

SEQ ID NO: 49263 - DNA, 365 bp, Glycine max
  Clone ID: LIB3139-114-P1-N1-D8
taagtttgcaaaaattatgaaccttagacattgtgttgttggtgatcttaaacttcttactgatgggaagttgtatgagggtaagcatattcctgtatctaatattagtgcaggggaaaatcatgtagttcatatacccttaatggcacaggaggaaattctgtcttctagtgcaagtgatttcagaactgcaatggtgagtaaaaatagcaaacctcaagctactgcaatgcatgtgggagctatagaaattatcattgatagtttcgcaagtcctgattgcaacatagttgtggcaatgcttttggttgatacttatcataccaatccttaaaatgcagttcgtattatttttgtgcgccttt

SEQ ID NO: 49264 - DNA, 223 bp, Glycine max
  unsure at all n locations
  Clone ID: LIB3139-114-P1-N1-E5
gganaaaaaaaaaaaaaaaaaaaaaaaaaaattatattttatataatnngaaaaaaaaaaggggggtggtaaaaaggggggggttgtntatatgagggggttggaggagagaaaaataattaatatagtggaaattaaatataaaataggggggggccccgccataggggagtttttcccccgggaatttatatggggcgggggcccgggggggaaccaagtt

SEQ ID NO: 49265 - DNA, 224 bp, Glycine max
  Clone ID: LIB3139-114-P1-N1-E7
ctcaaatatctggttgatgagtgtccttttgcatttgtgaactagtatgtaatattttagactcttacagttctcaagaagtcgcgtcagcatagggttagtggcgttagaactgtaagagtctcaaatatctggttgatgagtgtccttttgcatttgtgaactagtatgtaatattttattcacttaaataaagcgcattactatgtgcaatgagtgtgttt

SEQ ID NO: 49266 - DNA, 505 bp, Glycine max
  Clone ID: LIB3139-114-P1-N1-E9
gattttgtttctttgtgtgtgtatggtgatgataacttaattagtgttcatgaatatgtcaagccttactttagtggttctaaattgaaaagctttctagctggtcataatatcaccattactgatggtattgacaaaactagtgcaacttcgctatttagaaagttagcagattgtgattttctcaagagaaactttatgcagatgtctaatgttttgagggtggcttctgaggacatggcgagtttatggtcacaacttcattatgtttcatgtaataatctggaaatgcaagaagcttatcttgtcaatctcgtaaatgtgttacgagaatcgtattagcacagtccagatgatgctcgtcaattgacaaggaaagctctctctcgaattgaatggctgcaaaaagctgatgtgcctaccatagcacagattgaagagtttccattcgatgcaaaggatgatgaatgctccatgatcaatgaatatatctatctactgttga

SEQ ID NO: 49267 - DNA, 76 bp, Glycine max
  unsure at all n locations
  Clone ID: LIB3139-114-P1-N1-F9
aaaaaaaaaaaaaaaaaaaaaaaaaaaaaaaaaaaaaaaaaaaaaaaaaaaaaaaaaaaaaaaaaaaaaaaaanag

SEQ ID NO: 49268 - DNA, 478 bp, Glycine max
  Clone ID: LIB3139-114-P1-N1-G11
gcatgatgtgcgggccagccgtgttttggaaactcaaaatgagagcgtggactttatgatcatataaaagtggtgcccacacacagggttagaggggattgtgtgaagtgctaaagaggttcatgtggataattggaggtacatcgtttgagctggctggtgatgcaaatgggttactagttaaatggagtctggttcagtggaaatacattggtagaaaagatagcttaacattatttttaagtatctcatcctagtgtgaaggagggtactgcggtaccgccacatatgcacaaaagtcaggaccataaattgtcaatatttagtggctgcctcatgacaaacaactctgcattatattcagatgtttagaaacaagtgtagtgattgtggcactaactaactaagcatgcttttttttgggaatttactatttgaaggcagtacctcttcttagcattacatttatggtcactct

SEQ ID NO: 49269 - DNA, 358 bp, Glycine max
  Clone ID: LIB3139-114-P1-N1-G4
ctcgagccgtgcaatttagaaagttagcagattgtgattttctcaagagaaactttaagcagatgtctaatgttttgtgggtggctcctgaagacaaggcgagtttatggtcacaacttcattatgtttcgtgtaataatctggaaatgcaagaagcttatcttgtcaatctcgtaaatgtgttccgagaactgtatttgcacagtccagaggaagctcgccaattgagaaggaaagctctctctcgtattgaatggctgcaaaaagctgatgtgcctaccatagcacagaatggagagttccattcgatgcagaggatgatgaatgctcctgattcaaatgataatattgatctact

SEQ ID NO: 49270 - DNA, 404 bp, Glycine max
  unsure at all n locations
  Clone ID: LIB3139-115-P1-N1-A5
gaaagcacanagcctangactgatttgtaaancaacgaggagaaagagaaggcaggttaggatttatacaatacaactttttcgcagatctgttgaganatgccctttcaagaagccctcatcacatcctcagacaatgaactacataacagggtgacgacggaggcaagttcgagatacaacctagaggactcaacattgtgtggggaaatgattctcgatactggaaaattccagaacaaggtcctgcggagctgatccaagtttcatggttggaggtatccggcgtggtaaacttaccaggtgtcaagaaatatagggttgaattcgaagtgagagttaaagaccatgggttcggttggagtggcacggacgtgctagtgatggctaagaattgggaaaac

SEQ ID NO: 49271 - DNA, 365 bp, Glycine max
  Clone ID: LIB3139-115-P1-N1-A6
ctcgagccgatcgtctcgtggtctttttctagatcgcgagctagaactagtggtttacaaggagcaggtaaagccaacacataaatgctcaacagtggagataagcttgcgttggctaacacacaagaattctttgatggaaattttccagtggattcttggttaccaatttttgtgaattgtctctatcctgtaagtcaattaccttcagaagctgtcgttgtaaatgttacatgtggtagtggacgtggtggtttacccaccactgcttggattagatttgcagttaacattcgtttgtcaaacatcaacaaaaggatttgcacaatctccttgcatatggtataaaattggtattccttact

SEQ ID NO: 49272 - DNA, 391 bp, Glycine max
  unsure at all n locations
  Clone ID: LIB3139-115-P1-N1-B5
gtgcgagcaccacttggggtcgtttaggaaganccnccggcaagggggctggtgcttagtggtgttccttttcatcccgctggtcacaattcttttgatatgggcaatccttagacccaccaaacccaccttgacgctccaagacgtcaccgtctacgccttcaacgccaccgtggcgaactttctcacttcgaattttcaggtcacgctcatctcgcgtaacccgaacgaccgcatcggtgtttactatgatcgcctcgaaaccttcgtgacctaccggagccagcaggtcacgtaccgaaccgacattcctccgacatattaaggccataaagagatcaatgtttggtcttcgtttgtttatggtaccaacattcccggtgggccgttc

SEQ ID NO: 49273 - DNA, 314 bp, Glycine max
  unsure at all n locations
  Clone ID: LIB3139-115-P1-N1-C4
aatnagaaagaaattcgttttgttagnngaangnggaaccccggcgggatttccgttcacagttatttgcaacaccatttctaatgagacgctcatgagatatagctacgaaaaattactgcgccaggctaaagctccaagtatgattttacaatctttcaaaaattttgtttctttgtgtgtgtatggtgatgataacctaattagcgttcatgaatatgtcaagccttactttagtggttccaaattgaaaagcttcctagctggtcataatatcaccatttctgatggtatcgacaaaactagcgcatttt

SEQ ID NO: 49274 - DNA, 294 bp, Glycine max
  unsure at all n locations
  Clone ID: LIB3139-115-P1-N1-C5
gggccnncnnccttctatttcctatggccgacgaagccaaagccaaaggcaacgcagcctnctgctgcggggactatcctgccgccatccaccacttctccgatgccatcgccctggctccctccaaccatgtcctctattccaaccgatccgccgcatacgcctccctcaaaaactacgcagatgcattagcggatgccaaaaagacagttgaactcaagcccgactggtccaagggttacagccgtctcggtgccgcgcatcttggcccttcccaatacgatgatgctattt

SEQ ID NO: 49275 - DNA, 419 bp, Glycine max
  unsure at all n locations
  Clone ID: LIB3139-115-P1-N1-E11
ggatgattttttctcctttgcatcnnccttcaaagaagcaatgaaaatggtcgtagaagtataccatcatctaaaggctgttattaaaaagaaatacggtcaggatgctactaacgttggtgatgaaggtggctttgctcctaatatccaggaaaaccaagaaggtcttgagcttctgaagactgccattgccaaagctggttacactggaaaggttgtaattgggatggatgttgctgcttcagaattttatgataacaaggacaaaacctatgacttgaattttaaggaagagaataatgatggatcacagaaaatctcaggagacagcttaaagaatgtgtacaaatcatatgtgacagattatccaattgtgtccattgaggatccatttgatcaggatgactgggagcactatg

SEQ ID NO: 49276 - DNA, 256 bp, Glycine max
  Clone ID: LIB3139-115-P1-N1-E4
ttcaactaatcatttgtgtccctatgtggctgcagaagaatcacatgatctacaattactgctctgacactcaaagatttccacagggccttcctccagaatgtaacactgcctaaaaatattttaatttccctgtgtggattgatccagactccaattttcagctctctttttgagtttcctttttcttatcttttgtaatttccataatgataaattctttgattagttgtaaaaaaaaaaaaataaataaaaa

SEQ ID NO: 49277 - DNA, 391 bp, Glycine max
  unsure at all n locations
  Clone ID: LIB3139-115-P1-N1-E5
acagaaaggagtcttcggtttcttctgcnnnaggcnnaggnnagggaccttatggtggtggttatggacatcgacatgggcatgggcatggcaacattggtgggcatagctatgtgccagtgtacccggagcagatgcactttcacttgcatgcaccaccaccacaaattttcagtgatgaaaacccgaatgcttgttctgtcatgtgagtgaggttgtttctttccatttaactgggtgatggatggtgataatgatggtgtgcttagagaactagatactagagtctagagtgttactttccattctttatttcttattctttcaaatttgggctcttagaaatccacgggaacttttgagatggttttgtgcttaaggaagaaaagga

SEQ ID NO: 49278 - DNA, 402 bp, Glycine max
  unsure at all n locations
  Clone ID: LIB3139-115-P1-N1-E6
cccaacacaacctttattcttttttttccggccnncaaaaccaagcaangcattccttttaataatggctcaaaccctcggctccgatgagccaccccaaaccaccgattcccacaccccctccctcctccacctctccttcaaccaggactccggttgcttcgccgtcgccaccgaccgcggcttccgcatctataactgcgaccccttccgcgagatcttccgccacgacttcggctccggcggcggtggcgttgccctcgtccacatgcttcttcgctgcaacatccttgccttcgttggcgccttcttctgctccttcttctgcgaaccccgctatccttccaacaaggtcatgatctgggacgaccaccagtcccgctgcatcggcgagctctcctt

SEQ ID NO: 49279 - DNA, 85 bp, Glycine max
  unsure at all n locations
  Clone ID: LIB3139-115-P1-N1-F12
aacaaaaactaaactccattgaacaagaaaacaaaacaaggaaggggacaagaaaaaaaaggccgccccacccaaacngccaact

SEQ ID NO: 49280 - DNA, 334 bp, Glycine max
  unsure at all n locations
  Clone ID: LIB3139-115-P1-N1-F4
ggaagcgacttggtaatttgaaanagcggaaaaagggggttgtttagagcttatagtgcccctccgagggctcgttgcgcggcagccgtacaccgtcgcgaatatgacaggggggctgcggaagtggtcaggagaaaacccctccaagcggggagtcggagagctgtcagctcgttatccaccataacggtcgctgttagtccaatctttgctggaaggatgaggatttgcttgttggggagccctgcaattgggcacttggacacaataggttggccattaaccatggagattgtggtattgagcttacaagcatgggtgacaatacccacct

SEQ ID NO: 49281 - DNA, 408 bp, Glycine max
  unsure at all n locations
  Clone ID: LIB3139-115-P1-N1-F5
ccaggaccnanngtttcttctattcacaaaanccnnncgngnnaaanaggttgattggaaaattgactctcccccacggcacttcccgaagtgttaagagaatgcctctttctatagggggaggagctggtgcaaagaatgctattctcatgaatatgccaaatgctgttctttcaatgtggagatattttgttggagatctcgtctttgaaggttctaagatgacttctccctacattaaatgtacagcctccttcttcatagcatttggaaatttggctgatgataccatcaatttcgaggcttttccccacaagctggtgcagtttggagagattcaggaaaaagttgtattgaaattttcacaagaggaatctcttacagctgtgcaactaaggtgcgttcttg

SEQ ID NO: 49282 - DNA, 226 bp, Glycine max
  Clone ID: LIB3139-115-P1-N1-F6
aaaaaaaaaaaacctcaaactcaaaaaaaaaaaaaaaaaaaaaaagggacgggaaaaaaaaaaaaaaggaccgcggccacccgcaaaaccaccaccaaccgtcaacaacgggcggggccccgcaccgcggggcataaacgcgggcgccaaaaacgccgacggcggcccgcggaaccacgaccccccccaaggccgggagaaccgaggcaacgacaccgccagcgaa

SEQ ID NO: 49283 - DNA, 132 bp, Glycine max
  unsure at all n locations
  Clone ID: LIB3139-115-P1-N1-G2
gggcgnnccaaagcctgccctcttnttttggccaaacnaccaccaccanggccaggtgtaacaacaaaaaagccccccccccaacaaaacnncaggncccaacaacaacccaacccgngaggangggaaaag

SEQ ID NO: 49284 - DNA, 400 bp, Glycine max
  unsure at all n locations
  Clone ID: LIB3139-115-P1-N1-G4
ggccacacngcctctcatgtcntttaggggganncaacccaagcgccacctgcccagcctccaaggcaaggccatggtacaagccaacaacctagcccaaatgctgccaactatccaccacaagctcagccaggttatggcgtgcccccaacctcccaaccagcagcttatggtagtcaacctccagcacaatctggttatggatctggctatggaccccctcagacccaaaagcctagtggcacgccgcctgtgtatggacaatcccaatcacctaacacagcaggaggctatggtcaatctggtcatttgcaatctggatatcccccttctcagcccccaccttctggaggatatgcccaaccagagtcagggtctcaaaaagctccaccaatctgtt

SEQ ID NO: 49285 - DNA, 288 bp, Glycine max
  unsure at all n locations
  Clone ID: LIB3139-115-P1-N1-G6
aggaaagcacnccctcngcctcgattgtcngcaaaaagcngangggcccagcttagttcagaaagaagaccgggccccccacagcacggatgacgaatgctcctgattcaaatgacaatattgatctactgtagagcacagattcgatgggcttacaaggagcaggtaaagcttttccaaacaagactgtttttgacgataagctagcggtggctaacacacaagaatcctttgatggaaatcctccagtggatgtcttggttaccaatttctgggaattgactttat

SEQ ID NO: 49286 - DNA, 205 bp, Glycine max
  unsure at all n locations
  Clone ID: LIB3139-115-P1-N1-G7
aaaaggatttcccctcccaatnnaannacaaaccaaacaagaaggggaantactggaagggggggcagccccacccaanaaaggcaggctggaaaacaagaaatctaatcctggttggggtggaaacaaaagggaaaaaccaccacaaggaaccgaaaaaaaaaaaaaaagggggggcgcccaccaggggggccgacggcccggg

SEQ ID NO: 49287 - DNA, 412 bp, Glycine max
  unsure at all n locations
  Clone ID: LIB3139-115-P1-N1-G9
aggaacttttctcctttggngnacgncaaggcncagaaagcaaaagcctactgcaagagatatcacgccaagttcaagagaagaagagagggaaaaaccgattaccgtgccaggattcggttgattaatcaggacaagaacaaatataacactccgaaataccgatttgtggttcgctttagcaacaaggacattgttgcacaaataatatctgctagcattgccggcgatttagttcttgctacagcatattcacatgagctgccacgatatggtcttgaagtaggacttacaaattatgcagcagcttattgcactggtctcctgttggcccgaagagtcctcaaaacacttgaaatggatgaggagtatgaaggaaatgttgaggctactggagaggattattcagtgg

SEQ ID NO: 49288 - DNA, 388 bp, Glycine max
  Clone ID: LIB3139-115-P1-N1-H12
cggctcgagaccaatttttgattttctcaacgaagaggggaaagagacggcaacactttgctgtccgccttgaccgagcagagcttcgtcttggccctcgattttgccctaaagtactctcagtcacaacagacaccgtcgtcgtcgtcgtcgtcatcaatggcaccgaagcagaccaaggctgagaagaagatcgcttacgatgcgaagctgtgcgacctaatggaggagtacggccagatcctcgttgtgaactccgataacgtgggatcgaaccagctccagaacattcgcaagggtctccgtggcgactccgtcgtcctcatggggaagaacaccatgatgaagcgctcagtcaggatgcacgctgagaaaaccggaaacaacg

SEQ ID NO: 49289 - DNA, 362 bp, Glycine max
  unsure at all n locations
  Clone ID: LIB3139-115-P1-N1-H2
aaaaaaaaaaaaattttacttcaaaaaaaaaaaaaaaaaaaaaaaaaaaaaaggaaaaaaaaaaaaaaaaaaagaaaaaaaaaaaaaaaaaaaaaaaaaaaaaaaaaaaaaaaaaaaaaaaaaaaaagggggggccgccgccaagggggccggccaaccgggaaaaaaaaccgggacggggcccggagggggaccaaagcgcccaaaaaggggggggaaaaaaagcggggggaaaaaagggcaaaagggggccccgggggaaaaagggaacccgccaaaaanccaaaaaaaaaaacaagcgggaagaaaaaagggaaaagccgggggggccaaaggggggggcaaaccaacaaaaagggggg

SEQ ID NO: 49290 - DNA, 153 bp, Glycine max
  Clone ID: LIB3139-115-P1-N1-H7
gaaacgcgggagacccggtctaccctttctgctattacggaccaggcacgagacaccaggcgtacatctgcagacatatgactagacgtcacatggttcacacatctcacacaccgcgtcgaatgtgaacgtctcttcacgggacgcctatac

SEQ ID NO: 49291 - DNA, 374 bp, Glycine max
  unsure at all n locations
  Clone ID: LIB3139-115-P1-N1-H9
gggaaantttttaatccttttcacagggagccgcaccctaaaaccggaaacaaaagcaatcgttacttgatttcaagaatttctcaatttcttcctacttctttgtgtacgatttcttaagggaaagaaaatcactctctgtgctggtcacagacttcgtgaatcattttcttttccactcctagtttatttgctgaacactctcctatttgatataggacttcgtgtcagatttaaactttttctgtttctttctcagatctctgtttaatttcaaggtcaagctggtgaaattttggattagtgctcccactctcctatctggtataggacttcgtgggtagacttttctacttctctcctttctttcactc

SEQ ID NO: 49292 - DNA, 441 bp, Glycine max
  Clone ID: LIB3139-116-P1-N1-A5
ccttccttcgctcttctttttttcgactctttcgatcagatccgcgacacccaccccaccaaaaccttgcgcaacccatccatgacgcttggctcaggaggatccagtgtcgttgttcctaggaacttcagattgctggaggagcttgaacgtggtgaaaaaggaattggagatggcacagttagctatggaatggatgatggtgatgacatttacatgcgctcttggactggcacgattattggcccccataatactgtacatgaaggaagaatttatcaactgaagctgttttgtgataaagactacccagaaaagccccctagtgttcggtttcattcacggatcaacatgacttgtgttaatcatgaaactcggagtggtgaaccaaagaaatttggtcttcttgcaaattggcaaagagagtacaccatggaggac

SEQ ID NO: 49293 - DNA, 323 bp, Glycine max
  unsure at all n locations
  Clone ID: LIB3139-116-P1-N1-B1
ctcgagccgggcttaagtttttggaaaaccncggggggggctgggggggcttaatgaggcacctacctatgaccagcccccatacaatggcttcttcaatgatggggcttcttgggagtccacatatggggacttcttcctctcttggtattccaatcagctcatagctcatggagattgcctcctttcattggcatcttcaacttttggtgactctggggtgacaatctatggaaaactcccacttatgcactcttggtatgggactcgatcccatccttcagagctaactgcanggttctataacacagctaacagggatg

SEQ ID NO: 49294 - DNA, 361 bp, Glycine max
  unsure at all n locations
  Clone ID: LIB3139-116-P1-N1-B2
gcgaaaggcggnttttcattttatttaagaaaaaaaggcggcnaaggcacatgaagagtagagagcgtgggccacacaacacganggagnnncacaacatcaaaattagtcaggttgagttactggttacatatgaagggcaaagatttgttgttaatgatctcaaattactgatggatcaatttcatcgaaccgagtttactggaacttggcgaagactcttctcgcgagttaagaagcacatcatctggggagtcctaaagtctgtaactggaatgcatggtcggaaatttaaagacaaaggtcagagtcagccccctggtgctggtgttcctgaaattgatcttattttaagtgacaa

SEQ ID NO: 49295 - DNA, 420 bp, Glycine max
  unsure at all n locations
  Clone ID: LIB3139-116-P1-N1-B7
ggganngttcngttaatgatggagnngcagangncgagaagcggaagacatagggagagagagagagagagagagagaagaggnggcaancaaagaagctccgaacatgcacaagcaaacgcatacgcatgngnggaagcggancagagacagggaagcngggaaacggcatgcaagccatttcgccaaccgcataaaatggaatcgcatttcgcaactccaattatccaatcacaaagacatcgtctcacctcacaaaggcgccatcaactcccttcagattgattccacggagggaagatatttgctatccgccgcctccgatgcctcggtagcagtctacgacgtccaacgacccaccgtttacgaagccggcggcgtcatttcgaaacacagctctataattgtggttgacaagca

SEQ ID NO: 49296 - DNA, 362 bp, Glycine max
  unsure at all n locations
  Clone ID: LIB3139-116-P1-N1-C3
aaacagggnnnnatanngtgggtttcgcagaagagagagaaacccanngctagatagagaaactcgcaggggcagacatgtcttccttcgatgccttcgccgacgacttgaacgtcaactcttcttccactcgccagcacgacgatgacgaggacaacttctctggctacggcggctactcctccttcaccggaggattctccgccgacggagatgtcgccgtcgatcactccgccgccgcgtcgccggagatctacggcttcactgattcgaatcccgcttactctcagtctcccttcgaatcggccaccgtagagaacgaaaacggaaacggatacggcgacggcgacggtgtttttgtc

SEQ ID NO: 49297 - DNA, 315 bp, Glycine max
  unsure at all n locations
  Clone ID: LIB3139-116-P1-N1-C4
gagaaaaacaagatagagtaagtgagggggaaagtaggagtgggagggagttaaatgaagaagaggaacccgccaacaaaagaaccacgttgcttattcaaaccctttggttcctcttcgccctcaactccctctatctttccctttacttaacccacaaaccctttttttcttctgcttcagaagaaaaagaaaaagcagaactcgaaccagacacatacctaacacccttttcacacgaacctcactcttcaaagccatggcctattctcccttgctacctcccctggaccacttntgcgcgatcccacttct

SEQ ID NO: 49298 - DNA, 394 bp, Glycine max
  Clone ID: LIB3139-116-P1-N1-C5
gacaaaggcgcattcggtcatctctataaacaaaaagggagcagaggggcttaattttggaatttcaggggctcgtcttttgggcaccattcctcagtccatttcacagcaaactgtttggaatcaaatggcaacagtgagaacaccattgaattttgattctagcaagcagagcttttgtcaggtttctatcgaccttctcggtggaggaatcttagtggacaaaactggagattggatcacacttatacaaaattctccaattagtaacttgttgagagttgctgcttggaagaaaggctgtttaatggtcaagattgtgaagtctgggaatgcaagaatcaaaaggagtgattgggccctattggtacaagtgtttttaacaaacagcaac

SEQ ID NO: 49299 - DNA, 284 bp, Glycine max
  Clone ID: LIB3139-116-P1-N1-D9
aaaaaaatttgcgtgcccaaaaaaaaaaaaaaaaaaaaggaaaaaaaggaaggaaaaaaggggcccgccccccccaacccgggaaaaaaaaaaaggaccggaaccagcaggcagaaccagaaaaaccaaggggggggcccgaaaaaggggggcgcaaacacgggaaaaagagccggaccgggccaaagggggacccacacacaacccaaaacaagagacaagccggaaggagaaaaagaaaagccaggggggccccaggagagagcgaaatcacagccaaaagg

SEQ ID NO: 49300 - DNA, 340 bp, Glycine max
  unsure at all n locations
  Clone ID: LIB3139-116-P1-N1-E10
gaagatttangtggttacaaagaanacgaccncaacacaacgatgtttttgctcagatggaaacccattcgtttaaancgtctcttgatgatgttgaaactcctaaaggttccatgttggatcttaaaatttctcaatctaaaattgcactttccaagaacacagttggaggaaccattctgcgtagtgatttattggcaaattttttgacagagggcaattttagagcaagtgttgatttgcagcgcactcatcgtattagaggaatgattaaaacggcggccacagctcggattcctgagaaaacacgtatagcattggcctgggctatgaatagttc

SEQ ID NO: 49301 - DNA, 358 bp, Glycine max
  unsure at all n locations
  Clone ID: LIB3139-116-P1-N1-E11
ggaaattttaaagtggattgaagngagagaggaggcacggagcgtgcaactatgggcttggtcgcgtgctaccgcaaccgnncttcctcggaacctcgcattcgcttcctccaccaaactctccctctctcacagtcactctcttctacatcacttcctttcattccccactcccaaatcatcaaaccctcgcaaccgggtcgcaatctctctccaaaccccacgcgctcaatccggcgcgtccgcctccgccttcttccatggcctctgctacgtcgtcggcgacaacatcgacaccgatcagatcattcccgcggagtactctacccttcgcccttcgaagcccgacgagtacgag

SEQ ID NO: 49302 - DNA, 211 bp, Glycine max
  unsure at all n locations
  Clone ID: LIB3139-116-P1-N1-E12
annacggtgcagtgatttgncagcaacgaanangacgcacggtttatttcaaatgattgtggttcattccttgnngccaaggttggaaatcacaaacaaattgtcggtttccatgttgctggaagcaaaggaagactgggatatgcttcattgataccatatgttgagccagttgtgcaagctcaaagtgctgaagtttactttgactttt

SEQ ID NO: 49303 - DNA, 407 bp, Glycine max
  unsure at all n locations
  Clone ID: LIB3139-116-P1-N1-E7
cncgagcttaanttggctcgagncncncnancncncacgcacactttctttctctggctgtctcacccagatctaggagcaatggcgagcgctcccactccacgcgaagagttcgtgtacatggcgaagctggcggagcaggccgagcgctacgaggagatggtggagttcatggagaaggtctccgcctccgccgagagcgaggagctgaccgtggaggagcgtaacctcctctccgtcgcctacaagaacgtgatcggcgctcgccgcgcctcctggcgcaacatctcctcaatcgagcagaaggaggagagccgcggcaacgaggaccacgtcgccgccatccgcgactaccgctccaagatcgaggccgagctctccaacatctgcgacggaatcctcaaact

SEQ ID NO: 49304 - DNA, 350 bp, Glycine max
  unsure at all n locations
  Clone ID: LIB3139-116-P1-N1-E9
ccgaaaataggttggtttttgcnaacacgaaaggacgggacggtatattatgacctatgtctgtgccaactggacgcgnnnncaatagacaagcactttatggctacagtccaccatctatgcccaaattaccaaaatcatcatcctgctgttgctgcccctcaaagaagcaaaccaaagacgtctcagagctttatagagatgcaaagagggaagaacttgatgccgccatttttaattctcagggagattgacaactatgattgaatacgagaggtcaaatgctgatttcacaaatggaccttggagaaaaacattaggctttcgtcccacctcgttctcaattgaaa

SEQ ID NO: 49305 - DNA, 435 bp, Glycine max
  unsure at all n locations
  Clone ID: LIB3139-116-P1-N1-F4
tnnctgaagcngattggttttcattgcganancannngngncaccggatggactgccaccccaangcaggacgnncaggnnacaanngancggnnnatnncctctcaggaatgtgttcccaggacctattgtgttttaaatccacaaaatccttttgtgttaaataggtggatgggaaaattgactttcccccagggcacttcccgaagtgttaagagaatgcctctttctatagggggaggagctggtgcaaagaatgctattctcatgaatatgccaaatgctgttctttcaatgtggagatattttgttggagatctcgtctttgaagtttctaagatgacttcttcctacattaaatgtacagtctctttcttcatagcattntggaatttggctgatgataccatcaatttgaggcttttcccacaagct

SEQ ID NO: 49306 - DNA, 104 bp, Glycine max
  unsure at all n locations
  Clone ID: LIB3139-116-P1-N1-F6
cnnnnccgcnnggtgnattgggttgangacagcaccggaaacgcggccgtttccgtcgccggggcaaccgcccccgcgaccngccancccncaacgccccacag

SEQ ID NO: 49307 - DNA, 418 bp, Glycine max
  unsure at all n locations
  Clone ID: LIB3139-116-P1-N1-G4
cggaaggacgccttacgttgntataacgnnaancagccccaagagaaagatnngttagagggaaaccgtgcctttgatattaaatctcgctctagattggaaaaagtttcctctacaaaagcacaatttgttagtggaaaaaccttcaaatatgatataattggtgctggttcacattcttcaggagattttcctgaaaaggaagatcaagaaaaacccaaaaagattgataccagattgagacaaagaatagatcctcaatacaatgaggttcaggctcagatggaaacaaatttgtttaaattgtctcttgatgatgttgaaactcctaaaggttctatgttggatcttaaaatttctcaatctaaaattgcacttcccaagaacacagttggaggaaccattctgcgtagtgatc

SEQ ID NO: 49308 - DNA, 301 bp, Glycine max
  unsure at all n locations
  Clone ID: LIB3139-116-P1-N1-G6
accgaaacagcatttggggtgaacctgcacgaaccgnnggngggcgcgaccccgggttatacacacaaggccctcaaaagaactggggccaaattttaggtacacttacaagttggggcatatgctgtctaacggttcttatgtacggagtaagaagtattcattcaaggcatccccatatcccggacagaacgctttgcaacgtgttatcatattcggtgacatgggaaaggccgagcgtgatggttcaaacgaatatgccgattatcaaccgggttctctaaacaccacagaccaactc

SEQ ID NO: 49309 - DNA, 176 bp, Glycine max
  unsure at all n locations
  Clone ID: LIB3139-116-P1-N1-G7
gccaagagtggagtgatttatgagggagagcgnngacgcgccgggttgatttgtatgtatagggatcccatgcacaagaggcgngccactggtggcaagaagaaggcatggagaaagaagagaaagtatgagcttgggcgtaaggccgcatacaccaagttatcaagcaacaaaac

SEQ ID NO: 49310 - DNA, 55 bp, Glycine max
  unsure at all n locations
  Clone ID: LIB3139-116-P1-N1-G8
aaaancagttgagtaatttctnacagcnnggncaacccaggngcgtccngcaaca

SEQ ID NO: 49311 - DNA, 409 bp, Glycine max
  unsure at all n locations
  Clone ID: LIB3139-116-P1-N1-G9
gttgatcttcaagcgagcgngcnnncggcgnggtccttttaacaacagcgcgagccactctctcttgtcgccacatatttaacgacaattactaaaactgtttttccgtgatggagctggctttgagtttaggagacacgtccaagtcctttacatttctcgacaaggcggtgactttaccccccaacaaggacccacctgggttctgcttggcgccgagtttcgccgagaaaagaagcgattctgagagaggaaccgcttctggttcttcagatccaccggttcagctcgaccttcttcctttctctccggttctcagaccccaacaacatcctccctcttaccttcggatcccttggctcacccaagcatgtggtggagcggcgagggttctggacgtgaacctatt

SEQ ID NO: 49312 - DNA, 143 bp, Glycine max
  unsure at all n locations
  Clone ID: LIB3139-116-P1-N1-H12
aaaaaagtacaggtanttttaaaaaaaagaaagaaaaccgccaggggaattttgaagacggaaccgggccgcacccgccnnnatcctgtaagtcaattacctccagaagctgacgttgaaaatgttatatgtggtagtggacg

SEQ ID NO: 49313 - DNA, 421 bp, Glycine max
  Clone ID: LIB3139-117-G9-F2A
gacatttgcgccttctttcttgcaatcgcgtttgaataaaaacaaaagaaattcctcttcttattctccctcgcgcgattcatttcattttctctttggaataacctgcagggttgcttccatttcaacatgtagagcgcgctctttgttgatttcatttatgacaagttctttttttttgttgcgttgcaaaatccttctccttgaggcggcggcatggaaagcattgccgcgcagctgaagcgcggcatctcgcggcagttctcgtcggtgtcgctgcggaggaacctctcgtggcagttcacgcgccaggcctcgctggatcctcgccggaacaaccagcgcttcagcttcggccgtcagtcctcgctcgatccgattcgccgcagcccctgcttcggcaacgccgagcttaccgtgc

SEQ ID NO: 49314 - DNA, 229 bp, Glycine max
  Clone ID: LIB3139-117-G9-R2A
atcttattcttggtactgttcgggttatttgtttgacgtttgttctaatatacggggcgaattgtatgactcgcagatggacactcgacttagcggcgcaagaatgtttgctcatattactgggaggcaatatgaatattaatgtgcttagcgatgccacacacgtaggtgttgttcgatagctctgattgtattacattgctctcgatgctttgattgagttgtacgg

SEQ ID NO: 49315 - DNA, 276 bp, Glycine max
  unsure at all n locations
  Clone ID: LIB3139-117-P1-N1-A10
gaacggaacngtttgatttttngcgcgaacgccnncgcagggaacgtttgttatgcactgaggcccccaccgcaacacggcaggctttggaggcggctcacaactcccttcttgcttccgaggcccgtttggagcgtttggagcggcaggagcagtttcttgacgatcgggagcgcgaaatggtgcgtcggggtttgtcattcttggaggagctggagcttgaagaggcgcatgcggcacagctatcgagtacaggtagtggtgacgtggcaagtt

SEQ ID NO: 49316 - DNA, 161 bp, Glycine max
  unsure at all n locations
  Clone ID: LIB3139-117-P1-N1-B10
aaaaaaaattttatcaattggaaaaggncaaaaaaaaaaaaggggggggacatttgagaaaaaggggggccccccccaaaaaaaaaaggggcataaacagaaccacaacccaccaacacaaccacgcccggggcccgcaacacccccccgacgacaccgcg

SEQ ID NO: 49317 - DNA, 169 bp, Glycine max
  unsure at all n locations
  Clone ID: LIB3139-117-P1-N1-B12
cggcncgaggagtttgttttatttgnccgaagannacgcaagggaaaggcttgngtaaggcccgaacacgagcagaccgaaacngacancccnggcnngggnnngcncggagagagacncaancgnccncnaanacgaccacgcgcganagaaccnccaacncgagaag

SEQ ID NO: 49318 - DNA, 333 bp, Glycine max
  unsure at all n locations
  Clone ID: LIB3139-117-P1-N1-B3
aacaacaacccantttttttttctcactcactgcagaactcaatcgcatcgttgtccatggctaccatcgctcgcatcaaggcccgccagatcttcgacagtcgtggcaatccaactgtcgaggtggatttgacttgctccgatggtacttttgccagagctgctgttccaagtggtgcatccactgggatttatgaggcccttgaattgagagatggaggatctgactaccttggaaagggtgtatcaaaggctgttgacaatgtgaacaccgtcattggccctgntttgattggcaaggacccaactgaacagactgctattgacaactta

SEQ ID NO: 49319 - DNA, 283 bp, Glycine max
  unsure at all n locations
  Clone ID: LIB3139-117-P1-N1-B6
cgcaaaacgttatttttttttatccaacaangacgaccacccgcggggctctttgccttttatgggcatccctctactacgcggctgaaggagccaaggttagtttcaataacaagtgcacatacacggtatggccaggaaccctaaccggtgaccaaaagccccaattatcaacaactggtttcgagttgggtccaggagcatccaactctgtggaccttccatctccatggtccggacggttctgggcccgaacaggatgctccaacaacaacggaaggtt

SEQ ID NO: 49320 - DNA, 199 bp, Glycine max
  unsure at all n locations
  Clone ID: LIB3139-117-P1-N1-B7
cagggcgcttgntttgnttttccaaataagaacgcgcncaacgagaaattgttattggcaaatacacaccaatttttcgatggaaattttccaacagattcttggttaccaatatttgttaattgtctttaccctgtgagtcaattgcccgcagaagctgtcattgttaatgttgtttgtgggagtgggcgtggtggtt

SEQ ID NO: 49321 - DNA, 316 bp, Glycine max
  unsure at all n locations
  Clone ID: LIB3139-117-P1-N1-C2
aacncagggaactttggtgcatctncncaaannnccctctcccagccaagttgatctttcattcgacttcttcgaatcccaaggctcaggtctggtaaccttttgaggttgttgggtgcagaagggagcgatggctgcttcagaggagaatagtgcactgttcccaatattcattttgacaataatggccattcctatagtgccatatacaataacaaagttgtgccgttttgccagtaagaaatcaaagagcattcactgtcagtgctctgagtgctcgcggtccgggaagtaccataaatcgatattcaagagg

SEQ ID NO: 49322 - DNA, 147 bp, Glycine max
  unsure at all n locations
  Clone ID: LIB3139-117-P1-N1-C5
aacgaantttgnttttntttgcagcgagaccaaaacgncnggcacggcaactaagagggcacgcggcgccccacccacncacnnccaccacccccaganccaacgacaagccncgcncnnncnccnncgaccacgccaaacccaacc

SEQ ID NO: 49323 - DNA, 339 bp, Glycine max
  unsure at all n locations
  Clone ID: LIB3139-117-P1-N1-C8
gcggaaanttggttgntttttctccctagagnctcaagnaggccatcacttttagtgcttggatctcacatgggtactcaggagaacaagaattctccattgcaagacctaatggaagtggccaattctcaagaggagtccgcaatctctgaacaaacaccaaatggagacactggggagaaaccttccccttatgtgaattctaggaaaagaaaaggtccatccaaaggaaaagccaaagaaacttcaacctctaccaacccccctatggctgctgaagctagcgatgactcgaatgcaaagcgcaacaagcctaacgaaagggaggggaaggaaaat

SEQ ID NO: 49324 - DNA, 211 bp, Glycine max
  unsure at all n locations
  Clone ID: LIB3139-117-P1-N1-D4
gaanaacnnttgtgtgggtttnncnaaancagacggaacaagggcgggtcttttggggagcgggggcggcccccacgcaagcagaataggcctgggtggcacctaaaatataccttgtttttctgcggggcggatgaatcttatcatctatgctatacataatgatatactaatcgggtattgaacttatctctggctcagcaagtatgat

SEQ ID NO: 49325 - DNA, 363 bp, Glycine max
  unsure at all n locations
  Clone ID: LIB3139-117-P1-N1-D6
ctcaactttttgtgnctttcacacacnaacaccaacnccagacgcaactttatggcggcccgtaacgaacaccactaacaacaatcactaaaaaaagaaagaaaatttaccctgatcgcaggatctccgaacaaagctttgatttcacaaaagctaaattgagataaacacctgcatattaaatttttctgctctatacatgcatcacatgtccctcacactaaacaaaagaaaaacaccaccaccctttgcttttgcttttctataagtagtcaacggctcagccttaatttctttgctttttttaggttaaggtacatggtgagggagaagattcagattaagaagatcgacaacgccacg

SEQ ID NO: 49326 - DNA, 364 bp, Glycine max
  Clone ID: LIB3139-117-P1-N1-G12
agaccaaaacccaagtgttcttttttgtaaccctaaaacgagatcctcctcctcataagaagaaggatcgatgtgggcagcttcttgcctggcgtcatgctgcgcggactgcgcatgcgacgcctgcaggaccgtcgtatcgggaatcagccgccgttccgccaggatcgcctactgcggcctcttcgccttctctctcgtcgtcgcctggatcctccgtgaggtcgccgctcccctcatggaatcccttccctggatcaatcacttcaaacacacacctagccgagaatggtttgaaacggatgcagttctgccggttagcttggggaattttctggttttcactattctaacttgtctgatg

SEQ ID NO: 49327 - DNA, 356 bp, Glycine max
  unsure at all n locations
  Clone ID: LIB3139-117-P1-N1-G3
ggggaatggggaatttctttttggatttccgctcacaggnatttggaatagcatttttaatgggatgctcattagatataactatgaaaaaataccgcgcccggcttaagcttcaaggatggttttaccatccttcaaaaaatttggttctttggggggggatggggaagataacctaattagtggtcatgaatatggcaagccttactttagagggtctaaattgaaaagctttctagctggtcataatatcaccattactgatggtattgacaaaactagtgcaactttgcaatttagaaagttagcagattgtgattttctcaagagaaactttaagcagatgtctaatgttt

SEQ ID NO: 49328 - DNA, 323 bp, Glycine max
  unsure at all n locations
  Clone ID: LIB3139-117-P1-N1-H10
gctgagctacaaccgtgatatgttttatcaatgcctgcatctatgcagcagccaatgtagtatcccaattttaccccccctttacctactgtatcttctaatttgcctgaattgccatcatctttgctgcctgtgagtgctagtacccctagtgtaacatctgcttccttgcctcctaatttgcctccagcaccttctgctttgcctcctgctccttcagccttgcctcctgctccttctgctttatctcccgttccttctgcaacgcttgcttctgaaatttttccagtatcagtagcanataaggcacccaatgtttcaac

SEQ ID NO: 49329 - DNA, 317 bp, Glycine max
  unsure at all n locations
  Clone ID: LIB3139-117-P1-N1-H12
ctagtaatttgagttatcggatgctggactacaatgtgccgggaggaaagttgaaccggggactgtcagtaattgatagctacagattgttaaaagaaggacaggcattaaatgatgacgaaatttttcatgccagtgctcttggttggtgtattgaatggcttcaggcatattttcttgttcttgatgacattatggataactctcacacacgccgtggtcagccatgctggtttagagtgcccaaggttggaatgattgcagccaatgatggagttctactaagaaaccatattccacgtatccttaanaagcac

SEQ ID NO: 49330 - DNA, 377 bp, Glycine max
  unsure at all n locations
  Clone ID: LIB3139-117-P1-N1-H6
gcagggctactacttttgctttcatccataccaagaagaggatgatgccacttcacatatgctcaatcttggatcccaccaccaccctgtgactgggatgtttggggagatggtttatgccagagtgtttggcaacccagaaaatttgtatgcataccccaattcttatcagctgatgggaagtgccacccctagattgagaaggcaagagatgcaggcacacaaatctttgaacagaatttctatttttctcttttgctgcttccttctttgtcttgttgtcttctaagtgagcacttgagattatnntctctcattctctgttgtatactttgtaaagaagcatggattgcaacctttaaaaacttgatagatca

SEQ ID NO: 49331 - DNA, 304 bp, Glycine max
  unsure at all n locations
  Clone ID: LIB3139-118-P1-N1-A6
ggacccatctggcctgcggtagcgcgaacgcaaagaaggaccaaggggccattctcaaaaggggagagggcgcccacaccagacggcacnagaccaccaagcaacaacaaccaaacaaaaagggggaggacgccacgcgggaccaaaaaccaagaaaaaggggcgcgcaaagaccagcgagcacgggaacccgccaaggaaaaacagacgaaaacacgcagacgcaccacagaacacgagaacgagaaaaagcaaagcagagcgaaaaccaggaacagaagcacaaccaagaggaaaaggaaac

SEQ ID NO: 49332 - DNA, 421 bp, Glycine max
  unsure at all n locations
  Clone ID: LIB3139-118-P1-N1-B8
cagcagagacagactcanctctttcacacaacgnagatacttngggagagagagagagaaagagattggctgtgctctgctactatggcgagcaacagagagagagaagaatcgctgacattcacaatcccttcttcctcttcccattcttcccccatcaccgtcttcgaccaactcgacagttacctcgccgaccccagaagcgcctccggaagcttccagaacgacggccttctctcctccggagacgcctccgtcgccgatcccgacttcggtttctcccgccccgatttccggcagagcccccttgtcggcaccgtcgaagtctaccgacgccacgtcttcctttgctacaagaacccccgcgtttgccaccgcgcatagaaaccgcccagtttgatcgcttgccgaggttgcttca

SEQ ID NO: 49333 - DNA, 236 bp, Glycine max
  unsure at all n locations
  Clone ID: LIB3139-118-P1-N1-C12
ataaaagggcaccctcggttttgtatagagaaggccgctntccatagggggagtagctgttgcacagactgctatcctcatgaatatgccaaatgctggtctttcaatgtggagatattttgttggagatctcgcctttgaagtttctaagatgacttttccctacattaaatgtacagtctctttcttcatagcatttggaaatctggcttgatgacaccatcaattttgtggct

SEQ ID NO: 49334 - DNA, 293 bp, Glycine max
  unsure at all n locations
  Clone ID: LIB3139-118-P1-N1-D1
gccccacttttccctcgtttacaagacgggaacaacagcgaccgggcaagtttcaaaaggaggaagacgccccacacangccgactgaccccagagacagagaacgagggacaccctgacaagctctgcgaccaaagatccgatgctgtcctcgacgcttggcttgaacaggacccagacagcaaggttgcctgcgaaacatgcaccaagaccaacttggtcatggtcccccgagagaacaacacccaggccatcgttgactaccagacgatcgcgcgagacacctgcaggaa

SEQ ID NO: 49335 - DNA, 161 bp, Glycine max
  unsure at all n locations
  Clone ID: LIB3139-118-P1-N1-D3
cacgagcctaaccttctcgagaaggaggaaggaannncggaagcggaccggatatcacagggaaaccaccccgccccaccggacggacggccaccccaacgcaggacgagcaggaaacaaccgacagggagacacacacgcaggaaagagaccccaggacc

SEQ ID NO: 49336 - DNA, 351 bp, Glycine max
  unsure at all n locations
  Clone ID: LIB3139-118-P1-N1-E10
gagccngancaacctccngttattttggccancaagcacaaccagcagancccttacatccactttcgcaaggactggcagcgctatgtccgcgtgcacttcgatcaggccggcaagaagaagagcaggcgcaacgcccgtcaggctaaggccgctaccgtcgctcctcgcccggtcgacaagctgaggcccgtcgaccgttgccctaccaacaagtacaaccgccgtgttcgtgctggacgtggcttctccctggctgagctcaaggctgctggtatttcccgcaagcttgcgcgcaccatctgtatcttcgtcgacccccgccgccagaacctctccgaggagtccctg

SEQ ID NO: 49337 - DNA, 320 bp, Glycine max
  unsure at all n locations
  Clone ID: LIB3139-118-P1-N1-E3
ggaacccttgcactcctctatacggaggcagcanggccgggaacgggnngttcccaaaggacaacaaaccccgccgcaaggagaccgaagagaacggcaccacctccaaatccaaacccggtgctctacccactatcgttttgctcgatcgaggaaattgcttcttagctttgaaggtatggaacgcacagaaggctggagcttctgctgtccttgctctggatgatattgaggaaaagttgataaccatggacactcctgaggaggatgggtcatctgcaaataccaagagaacataacactaccatttgctctcattg

SEQ ID NO: 49338 - DNA, 223 bp, Glycine max
  Clone ID: LIB3139-118-P1-N1-E5
ctcagccttacctgctttttctggcccacaggctactgccagatcttctttaaatgcggaatcctctgcatgatctggaatttgtgttttctctcgcttgttcgtttgtttaattcaataaaggaaattaggcatgaccctcttgttgagtatgctctgcctatttgaaaatttccacacctcttttaattatcgtaatgatgtgtgaagtgtgtgttatttt

SEQ ID NO: 49339 - DNA, 392 bp, Glycine max
  unsure at all n locations
  Clone ID: LIB3139-118-P1-N1-E9
ggcaacaagcacactcatttgtgttgggangccgncgcagggcacaggagcagcattgtaagaagaccaccctgaccagaanctaacggngataccgacggacccacaccagcagcttgatctcgctcgcaagataacctccatggccatcgcctctcgtgtctcttctctcgagtccgacgcctctcgcctccgtcagaagcttctcgaaaaggaccgaatcattctcgacctcgaagaccgactctcctaccctcacccgtgcctcccaccaaaccgtctccaccctcaacaccggcctcaacgaaaacattaagctttccaaggagagggatcaattgggcgccaccgtcaagaagttaagtcgagactctgcaagccggagacattta

SEQ ID NO: 49340 - DNA, 90 bp, Glycine max
  Clone ID: LIB3139-118-P1-N1-F12
aaaaaaaaaaaacctccgttttttttaaaaaaaaaaacaacaaaaagggaaatgttttatattaaaaaaaaaacaaccggcccccccccc

SEQ ID NO: 49341 - DNA, 212 bp, Glycine max
  unsure at all n locations
  Clone ID: LIB3139-118-P1-N1-G3
gagccattttttccttccttcacnncnacacncagcaacngggacgggacactttaatgatgagggcaggcccacccaaaaccctaaccaatctttgcccctctttcccattcccaaccaaaccccaaaaccaatctaccactagccacgctttcccttccactcgcctccgccaccgcgccatttacgcggtggctaacgctgcgcatcct

SEQ ID NO: 49342 - DNA, 185 bp, Glycine max
  unsure at all n locations
  Clone ID: LIB3139-118-P1-N1-G4
cacggaactcgagctcccaggacaaacaggaagaaaacgagcncagtcgccaggaggagggagccacccacccagggcaccacagaatacccagggaaaccagcggagaagggagccaagaacgaccccgaagaacgccgaacacagacagcacaagccagcaagcagaggcaggcaacaccagg

SEQ ID NO: 49343 - DNA, 421 bp, Glycine max
  unsure at all n locations
  Clone ID: LIB3139-118-P1-N1-G8
gccggattgagttttnctagctcaatcttccttatacagtgcttcgcaacttggattccatagcacagaagttggtagatgttaccaaggactgcacagtgaagaacttgaagcactataatcactcaggttaattgcaaggggaaaaaatggaatgccaactctagcatacataggatggtggtgttgagaggtgaagcaagtacctgccaatgtaataatggtagtgttgaggtacctctgatgatggtgatgacaccactgagcagattgtgaacttgtgatgcctgtatgcactgccttaattgagtgtgaaagaataaatatatgccagcgattgatatggagatttgggtagtaaaaaacagtgtaacttaaaagcttatactaatggtagtgaactgtggttactagttttact

SEQ ID NO: 49344 - DNA, 258 bp, Glycine max
  unsure at all n locations
  Clone ID: LIB3139-118-P1-N1-H12
aagcgagcncangatcnngatattatgtggctcatgaaagcctcaaggatcaaattcctgctgttgacaagttgtattctactaaggttaataagtttgcaaaaattatgaaccttagacaaagtgttgttggtgatcttaaacttcttactgatgggaagttgtatgagggtaagcatattcctgtatctaatattagtgcaggggaaaatcatgcattttaaatacccttaatggcttcaggaggaaattctgatt

SEQ ID NO: 49345 - DNA, 412 bp, Glycine max
  unsure at all n locations
  Clone ID: LIB3139-118-P1-N1-H4
ggaggatctatccttctcttatccacgangngnagcanggggggttttcgatgctgaacccgaccccgcccttcttctaatcacacgacgactcattccgtacacttgacactctcgtcaacaatggccgatgttgccggagccacagtgagtccctctatcggtgaaaccaacgatgcgcagaagaatgtgttcgatttgggagcgtttgttggagacctaactttggaagatgatccaagcagcgatgatatatcattggaaggactagaacaggaactagaagagtgtaagaacaatgatgtaggtgcaaatatactgtctaaaggtaccaaacttagggattatacaaaaggagttgagaacgatttgcgcaaagttgaattggattcaattcacgattatattaaag

SEQ ID NO: 49346 - DNA, 255 bp, Glycine max
  Clone ID: LIB3139-119-P1-N1-A12
agaaatgatttttgaggacgaaatgacatatcgtgcgggtgtttttttctatcttgaccaacacttatcattatgttgtaagatcattttacggaccaagtgatatcatggtgtgaatgttttaacatttttttttttgtttaagctagcttattatgcaaaggatttgttttcatattatttcaagcacaacaactttttcagttttattcgacagttaaatacctatggatttttaaaaattgttccatacaa

SEQ ID NO: 49347 - DNA, 299 bp, Glycine max
  Clone ID: LIB3139-119-P1-N1-A3
cggcaagactattaccctagaagtcgaaagctccgacagcatgggctaacgtcaaggctaagattcacgacaaggagggaatccccccagaccagcagaggctgatcttcgccgggaagcagctcgaggacggacgcacccttgctgactacaacatccagaaggagtcaactctccacttggtgttgcgtcttcgtggtggtatgcagattttcgtgaagactcttacgggtaagactattacccttgaggtggagagctctgacaccattgacaatgtgaaggccaagattcatgac

SEQ ID NO: 49348 - DNA, 385 bp, Glycine max
  Clone ID: LIB3139-119-P1-N1-A4
taagatttgaaattttaataaaccgcgatcacaggttggcgcggcttaaaaccggaaacaaaagcaatcgttacttgatttcaagaatttctcaatttcttcctacttctttgtgtacgatttcttaagggaaagaaaatcactctctgtgctggtcacagacttcgtgaatcattttcttttccactcctagtttatttgctgaacactctcctatttgatataggacttcgtgtcagatttaaactttttctgtttctttctcagttctctgtttaatttcaagttcaagctggtgaaattttggattagtgctcccactctcctatctggtataggacttcgtgggtagacttttctacttctctcctttctttcactcttc

SEQ ID NO: 49349 - DNA, 327 bp, Glycine max
  Clone ID: LIB3139-119-P1-N1-A6
gtcatttgtttcagagtacccaattgtttcaattgagggtcagttgactaggatgactgggagcactatgctaagctaactgctgaggttggagccaatgtacaaattgttggtgatgatctcttggttaccaaccccaagagggttcagaaggcaattgatactaaagcatgcaatgctcttctccttaaggtcaaccaaattggtttctgtgactgagagtattgaagctgtcaggatgttcaaaaaagctggatggggtgtcatggccagtcacagaagtttatagactgatgattcctttattgttgacctttcttgtggttt

SEQ ID NO: 49350 - DNA, 290 bp, Glycine max
  Clone ID: LIB3139-119-P1-N1-C5
taaaaaaaatatctatttaaaaaaaccaaaaaaccaaaatggagggttttaatttaaaaaaaaaaaaaaacaaaaaaaaaaaacaaaaaaaaaaatgccccccccccaactaaaaacctcatcaacccaaaaataaattccaacccgaaccctacagccaacccaccttccctaataatgagtcgtataaaacctttcctaaatcatagccaaacccatatcctgtataaaattataatcctttcacatttccacacaacatactacccataacctaaaaattaaaaccc

SEQ ID NO: 49351 - DNA, 255 bp, Glycine max
  Clone ID: LIB3139-119-P1-N1-C7
aaaattataaaaaaaaaaaaaaaaaaaaaaaaaaggggacgagttatttataaaaaaaaaaaaaacaaaaaaaaaaaaaaaaaaaaaaaaaataaaaaataataaaaaaaaaaaaaaaaaaaataaaaaaaaataaaaatggccccccccccccttttattctttctccccctaaatttaaatctttcccctcccctttataaatacccattatttctattattatatttttaaatattctatttaaatattttt

SEQ ID NO: 49352 - DNA, 388 bp, Glycine max
  Clone ID: LIB3139-119-P1-N1-E5
ctctatgttagattaatgttttaagagttgcctaatggggcggtgaatccaaaatgaaacagtgaactttgttatagcaatgaagtgtgttccctctaccgtgtttcatttgctcttgttcatcttccccctagtactctctgttcacttgatttcagctttatctccaactgggtcagccaaacattccataaagtttatcctagggggtcagaatttgggtccatggaagaatggcgttacacaagtagctcaagcagcacgttctagaactaagggtactcttgtgctagcagcaaacaggaccaataggcctgacattctacacggatttcgacgttatcaaggtggctgggacattgcaaatcggcattactgggccttagtt

SEQ ID NO: 49353 - DNA, 359 bp, Glycine max
  Clone ID: LIB3139-119-P1-N1-E6
atcttggatagtaattaacctcactcaaactcgggatggcatgaaccaataacagttcttgcactgaggtttcacgatgttgctggaacttgcacttggtttgtttgtgttagctttgtttctgcacttgcgtcccacaccaagtgcaaaatcaaaagcacttcgtcacctcccaaaccctccaagcccaaagcctcgtcttcccttcattggccaccttcaccttttaaaagataaacttctccactatgcactcatcgatctcttcaaaaagcatggccccttattttctctctccttcggctccatgccaaccgtcgttgtcttcacccctgagttgttcaagctctttcttcaaa

SEQ ID NO: 49354 - DNA, 355 bp, Glycine max
  Clone ID: LIB3139-119-P1-N1-E9
agtttggcactggaagcacctcctacaaccacagctgcgcaggagagtgctacaacacagcagcctgaatccacacctgcatcaggtaatgatccacctccatcggagtctacctcagacaccaggccagctcctgcgactgctccacctcaaccagaatcaggtgaaagcactgtagataatggcattcctacctctacaccagcaagtgatggagatccaaatgttaatggtgaaaatgttcaagcagcatctacgggcaatccagcaccagcaccaacaccaacaccacctgatttccccgtatcaccagcagcagaggtttcagagactactgcttcaagtccacctacag

SEQ ID NO: 49355 - DNA, 381 bp, Glycine max
  Clone ID: LIB3139-119-P1-N1-F8
tgattctgcgttttgatctattggcaaattttttgacagagggcaattttagagcaagtgttgatttgcagcgcactcatcgtattaaaggaatgattaaaatggtggccacagttggtattcctgagaatacaggtatagcattggcctgtgctatgaatagttcttttagggggcgcgccagttctgatatttacaccatctgctctcaagactgtgaattatggaatcctgcttgcacaaaagcaatgactatgtcatttaatccaaacccgtgttctgatgcatggagtttggaatttctgaagcgtaccggatttcattgtgatatcatttgtgtcactggatggactgccaccctaatgcaggattgttaggtta

SEQ ID NO: 49356 - DNA, 299 bp, Glycine max
  Clone ID: LIB3139-119-P1-N1-H5
ccagagcacaacaacaacatctagcatgagaagaagaacaagagggagagttggagatattggcagttaaagcattctccactacactttgtgacaagtcatttgatgagactccatcctctgatgagctaactacgctggttatagatcctagcaaagatgaactggaaactctgcaagggcatgaatctctggcagggattaaatctaaatgcatatctaaaagggagcattttatgttggcattcatgatgaaggaatgaacattatatacacgttttgagatttatgaatgccat

SEQ ID NO: 49357 - DNA, 196 bp, Glycine max
  Clone ID: LIB3139-120-P1-N1-A8
gagaaacttttccatttcatatcagatcctgcttcttgggcccgttcctttttctcactgccactcttcaaacttgccttactttcaccaacacccaacaaacaaagttacttcattgcaaactctatattagtctttactttatttggttatttcacctctgaacaaaaccagtgaatgaatgaaacaacctacc

SEQ ID NO: 49358 - DNA, 405 bp, Glycine max
  Clone ID: LIB3139-120-P1-N1-B10
gtctttttattatgttgaggattcaaaattttgaggggggggggctcttcctagacaacaaagagcaaagagttggagcagaaacaatggtggggactccaattaatggaagaaccaggcaagctttcacagttgtcaatggcggtggccacgatctttgccccagtagtactcctccaagcaatgctggatcggactatggtgtcatagagttcaccagagaggatgtggaggcattgctaaatgaaaaagccaagagaaaggacagatttaattataaggaacgatgtgaaaatatgatggattatataaaaaggcttaaggtttgtatcagatggttccaagaccttgagatgtactactctctagagcaggagaagttaaagaattcactggaaatgaccc

SEQ ID NO: 49359 - DNA, 143 bp, Glycine max
  Clone ID: LIB3139-120-P1-N1-B7
tctagatcgtgggctgccgccctttttttttttttttgggtcggatagcataaagcacgcactttcttaagtgaagttacggttttgcccttcttctggtggtgttggagaggtacatgtctgtaggaacatcatcattgata

SEQ ID NO: 49360 - DNA, 406 bp, Glycine max
  Clone ID: LIB3139-120-P1-N1-C11
ttctagggctaatatccatcgcagggggagaaagggagaggcgcgaaaatgagcggagcgaaggggaagaagaagggagcgagcttcgtgatcgattgcgcgaagccggtggaggataagattatggacattgcttctctggagaagttccttcaggagaggattaaggtcggcggcaaggccggtgcactcggcgattccattaccgtcaccagggacaagagcaagatcaccgtcacctccgacagcaacttctctaaacggtatctgaaatatttgaccaagaagtacttgaaaaagcacaatgtgagggattggcttcgcgtgattgcatccaacaaggagcggaatgtctatgagttgagatacttcaacattgctgagaacgagggtgaagaggaagact

SEQ ID NO: 49361 - DNA, 199 bp, Glycine max
  Clone ID: LIB3139-120-P1-N1-C12
cattcttgcataatattaattccactaaccctatacaaacccggcggctttattacaatgggggtgtcaaatatcattatgataactgtctcttttgcaattgcgaactagaatgtaatattttattcacttaaataaagcccattactataagcaatgaatgtcgttttaatattattataaaaataaaaacttatat

SEQ ID NO: 49362 - DNA, 353 bp, Glycine max
  Clone ID: LIB3139-120-P1-N1-C5
ctcgagccttatgcacagtccagaggaagctcgccggcgcagaaggaaagctctctgtcgcattgaatggctgcaaaaagctgatgtgcctaccatagcacagattgaagagttccattcgatgcagaggatgatgaatgctcctgattcaaatgataatattgatctactgttgagcattgatttgttgggtttacaaggagcaggcaaagcttttccaaacaagattgtttttgatgataagctagtgttggttaacacacaagaatgggtgtgtggaaatttttcagtggattcttggttaccaattctttgtgaatttgcttttattcttgatagtcaattaccttcag

SEQ ID NO: 49363 - DNA, 227 bp, Glycine max
  Clone ID: LIB3139-120-P1-N1-C6
aaccaaatactcaaatctacttggccacagctatgcgcgacactaagcgagagcgcggtacttcttcctgcactgtcaccccctattatttgtcatcaaaaggatcaaatcgggatgagatcgactaataattcttgatgaactctgacggttacccatccatccctcacaccaatgtactcactcccatccaaattccctaagcagctcacacattatctatgcct

SEQ ID NO: 49364 - DNA, 183 bp, Glycine max
  Clone ID: LIB3139-120-P1-N1-C9
ctcaaacctttttttcttcgagagaacaagaacataacggagggtatattttcttggacagaagaacaagcatagaatggttttagtgagaactaatactgtgaagaaattctctcggcaggtgatagatctttactactctttcatgaccctggacttctatactaacatgaatctttttta

SEQ ID NO: 49365 - DNA, 185 bp, Glycine max
  Clone ID: LIB3139-120-P1-N1-D4
gctacagttaacctctccaactatagctttgagtgtggaaaaagctgaaaggttttggcacaattttgccatattctagcgtcaagtgagatggattattatacttcattattctatatacaatattttgcactaatgtatatagaataatgaagtataatattgtgcaatttaaaaaacaaaaa

SEQ ID NO: 49366 - DNA, 153 bp, Glycine max
  Clone ID: LIB3139-120-P1-N1-E10
ttctctaggataattttttttgctcataacactaatcacccccagccgtaatatttgttagagggaaacttttccttttatattaaatctcgctctatattggaaaaagtttcctctacaaaagcacaatttgctagtggaaaaaccttcaaa

SEQ ID NO: 49367 - DNA, 107 bp, Glycine max
  Clone ID: LIB3139-120-P1-N1-E11
gcgaaagtttattaggcatgaccctcttgttgagtgtggggtgcctatctgaaaatttccacacctcttttaattgtcgtaatgatgtgtgaagtgtgtgttatttt

SEQ ID NO: 49368 - DNA, 390 bp, Glycine max
  Clone ID: LIB3139-120-P1-N1-E2
tgcaaccgccgtttatctcacgtgatttcatctttgactgcttccttgaggtttgatggtgccctgaatgtggatgtgactgaattccagaccaacttggtcccataccctagaatccatttcatgctttcctcctatgcaccagttatctctgctgagaaggcctaccatgaacagctctcagtggcagaaattaccaacagtgcttttgagccatcgtccatgatggccaagtgtgatcctcgtcacggaaagtacatggcgtgttgcctgatgtaccgtggtgatgttgtgcccaaagatgtaaacgctgctgttgccaccatcaagaccaagaggaccattcagtttgtggattggtgccctactggttttaagtggggtattaac

SEQ ID NO: 49369 - DNA, 172 bp, Glycine max
  unsure at all n locations
  Clone ID: LIB3139-120-P1-N1-E8
ggtatccagctgcagtagaaagatcaaggaaggaaggaagggagatgttttttgttataaggcacaccattcatacnccctgcctattccgtaatcagacacttgtattctgcatctaaagagattacagtcagggagcctctgaacttcccactcattgaggaaatgtcat

SEQ ID NO: 49370 - DNA, 250 bp, Glycine max
  Clone ID: LIB3139-120-P1-N1-F11
ctgcaagtcatcgtcgcggtcatggcacgccaatgtgggcgtagtgtgatttcctccgtgcacagggttgccatggctatatctccatctggtataaacccatcaattggagctaaactttctcctggttctccagaggctgttacactagctcactggatctgccaaagttatagttactatttagggttcgacttactgtgatcagattcttttgttggttacatgatgctgaaacaactgtggcatc

SEQ ID NO: 49371 - DNA, 295 bp, Glycine max
  Clone ID: LIB3139-120-P1-N1-F12
gaagtagttatgaggaggttgaagaggaagcgccgggggatgagacagagatccaagtagtgcgttaatccaagtagttgatttccgttgcttttataattatgttgtcaaattgggcacccagttgttagaggcactggtttctcctttttgatgttttgatacatttttgtttggtttaattcgtcttatgttattagctgaaaacaatgctgttactgcgtttgcgaatcaacatgatctcttatatgcatttttgattaaaaagggcttatagtttatttttaattatatt

SEQ ID NO: 49372 - DNA, 411 bp, Glycine max
  Clone ID: LIB3139-120-P1-N1-F5
tgatcaagaacttctctgctatggctgctctgcaatactgggaatcgctgcgtaattcgcaccctgagctctccgattggtacaattcgctggcggatctgtaccagaagaagctctggcaccagctcactctcaagctcgagcagtttgtggctctcgccgtcttccaggctggtgatgctttaatacaattatatcacaatttcatcacagactttgagacgaaaatcaaccttttcaagcttgcacattttgctgttatagtttctcggcagtattctgaaaaagaagctgctgttggttatcttggaggggtcattcagaaacttcaagacactagggagcagcgcatagaagaacctattttttacattaagatgcaaattgcaatattcaagcttgagcaaggtg

SEQ ID NO: 49373 - DNA, 272 bp, Glycine max
  Clone ID: LIB3139-120-P1-N1-F8
gaagaataattacatttccattcttcaccaacaaggttgggcacaattacagcaacatgtgggaggaggagatggacttggtggtgcgtgacctcaacgtgaatgagagggtgaggagcgaagggatagttatcagaaggcggcttcagctgatgctgtacaatatcatgtataggatgatgtttgatgccaagtttgagtctcaagaagaccctttgttcattcaggccaccaggtttaactccgagagaagccgtttggcgcaaagattt

SEQ ID NO: 49374 - DNA, 185 bp, Glycine max
  Clone ID: LIB3139-120-P1-N1-G7
accatctagttcatgttctaatggcaagaaaatgaattcgctggctccaactaaggcttccatgagaggatcagcggatcagaacttcagtggaaggttggtggatgagagcatgataatactgaggaagaggatccatgagatgtacatgattgagaggtactttgagctctcttcagattgta

SEQ ID NO: 49375 - DNA, 143 bp, Glycine max
  Clone ID: LIB3139-120-P1-N1-H7
atttttctgtgtacatagacacttatctgtaccactcaaccgaatttttagaacgagagggagagttagaatattcacaagagagatttagagagggaaattgtccagtgcacactttcttgcttctaattttcaaatttatt

SEQ ID NO: 49376 - DNA, 371 bp, Glycine max
  Clone ID: LIB3139-120-P1-N1-H9
caactctgtttgtgaattctgcttgcagctgatggcgcaagtgctgctccatgggactcttcatgccactatctatgaagtcgataagctcaaaattggtggaggcaactttttaaccaagatcgtacaaaacatcgaggagactgttggtattggaaaaggtgtcactaaactatatgcaaccattgatctagagaaggcacgagtggggaggaccagaattattgaaaaagagattaaaaatccaagatggtacgagtcctttcatatttattgtgcccatatggcatcaaacatcatatttacagtgaaagatgataatcctattggggcaaccttaattggaagagcatatgtgcctgttcaggaga

SEQ ID NO: 49377 - DNA, 309 bp, Glycine max
  Clone ID: LIB3139-121-P1-N1-A6
ctcgagccgattcagactacagggattctttccctttttattttatagggtgccctttatttgaaattataaatgtcctttaagattagagtgttcctgtccgttccagaataaggacatctcaaagtttcgtcttgtggctataataaggtgctatggcaccattttgttggatcaatgtaatatttgtcaattgtcaaaataaaaaatttggaagcggatggctgtaaaaaaaaaaaaaaaaaaaaaaaaaaaaaaaaaaaaaaaaaaaaaaaaaaattaaataaaataattttttatttatatata

SEQ ID NO: 49378 - DNA, 394 bp, Glycine max
  unsure at all n locations
  Clone ID: LIB3139-121-P1-N1-B12
ttgacgctttcctttattcacacacacannaaacactggtgggtgttttttaccacacctttttctgcctaggtttactttccagtttccacccaaagcaaccaaccaaccaacaaacaacacaatgtatccaaaggtgaaggtaagacacgacgacaactacgctgaacttggtcttaaagctttcctctctctatatctgaaaccatctgcttcttcagttgatggaccagaaagttgtatcttcggcatccattgtcaaagcaccatagtgatatgtgcctgtaactatttcaagagttcttgttactgagtaagatttttgaactttagtttgggatcatattccttcaagagctacaggttccgggtagggtgtttttcctgatgataa

SEQ ID NO: 49379 - DNA, 391 bp, Glycine max
  Clone ID: LIB3139-121-P1-N1-C5
gccacttcgtaaccaaattttcttccttcgttggcatgggtgatctcttctcctcacaatgagcagatcagggcaaccaccggatttgaagaagtacatggacaagaagcttcagatcaagctgaatgcaaatcgcatggttgttggtactctccgtggcttcgaccagtttatgaatttagttgttgacaacactgtggaagtgaatggcaatgagaaaaatgacatagggatggtggtaatcagaggaaatagtgtggtcactgttgaggcgcttgaacctgtgaacagggactcgatttctgtggcttgaaaacattctatataaagtattttctggttaatggtagggtatttgaacaatgtagcctttgagagtaagctagtaatt

SEQ ID NO: 49380 - DNA, 392 bp, Glycine max
  Clone ID: LIB3139-121-P1-N1-C8
tgtgattcgttttttcactttcactttaccaactccggacggtttctctctgtttccttcttcaccgcatcaatggagttggacggcgttctcctcggcatgtgcaaccctctcctcgacatctctgccgtcgtcgacgacgctttcttgcaaaaatacggtatcaagttgaacgatgcgattctcgctgaggataagcacaaacctatgtatgaagaattggctaacaatcctaatgtggagtacattgctggaggtgctactcagaattcaatcagggttgctcagtggatgcttcaagcaccaggtgccacaagttacataggttgcataggaaaggacaaatttggagaggagatgaagaagaaatgtacacttgatggtgtaaaggt

SEQ ID NO: 49381 - DNA, 243 bp, Glycine max
  Clone ID: LIB3139-121-P1-N1-E10
tgaagtttcttcaagcattggtccattaccaacagggggggcaggtttgagcttaaacatggtcaatcatgagcctaaacgttggtcatattttcagaacttggccaaagaggggtttgataatgtatctctaattgatcaggattatcttggtttttcgtttgctgcgagaaaagctcaagaggtgggatagtaatcttcatacattttctcttttaccatctgtatgtattttttcttgtc

SEQ ID NO: 49382 - DNA, 389 bp, Glycine max
  Clone ID: LIB3139-121-P1-N1-F10
tagtagagtttctattttctcctcgttgttcttcgcgtttgcggttttcaatttcgattctttcgctaatttaataagatgtttgggagggcaccgatgaagagcgataatacgaggtactacgaaatcctcggcgtctccaagaacgcttcgtaggatgatctgaagaaggcttacaagaaagccgccattaagaatcaccccgacatgggcggtgatcccgagaagtttaaagagctggcgcatgcttatgaggttctgagtgaccctgagaagcgtgagatatatgatcagtatggtgaagatgctcttatggaatgaatgggtggtggctgtagccattattcatttgttgtttttttatctttctttggcagtgggagtccttt

SEQ ID NO: 49383 - DNA, 77 bp, Glycine max
  Clone ID: LIB3139-121-P1-N1-F6
gcccatgtttgtcatggcctatatttattccactttaccttgtgatggaaactacctgatttaagcttgttggcttc

SEQ ID NO: 49384 - DNA, 390 bp, Glycine max
  Clone ID: LIB3139-121-P1-N1-G10
gttctagatcgcgagcggcccccttttttttttttggggttaaaataacacacacttgacacattattacaacaatgaaatgaggtgtggacattgtcatataggcatatgatactctacaagtgggtcatgcctaattacctttattgaattaaacaaacgaacaagcgacagaaaacactaattccacataatgcacaggatctcgaagtcccaaaaaacctggctgtaacctgtggaacaaaataagctggtacacaaaaggctattatcatgaacttgacaaactctgttctcagcatgcggaaatatcctgttggatataccgtctcttgaggttataccacggcttattactacgtggaaagtacatcctctgttctcatagca

SEQ ID NO: 49385 - DNA, 218 bp, Glycine max
  Clone ID: LIB3139-121-P1-N1-H4
tgaaaaaaaattatttttataaaaaaaaaaaaaaaaaaaaaacaaagctattttataaaaataaaaaaaacaaaaacaaaaaatatcaaacaacccaataacatttcaaaccatcaaattataccttcccaactctctttccaaatactattttatcaaatattaattttttattttacactatttttttccttcactactacttttttcccttcatt

SEQ ID NO: 49386 - DNA, 368 bp, Glycine max
  unsure at all n locations
  Clone ID: LIB3139-121-P1-N1-H8
tcgagcctcgagctcttttatcggctcgagcccattattcttcatgactgancagcatgcttcttctgtggggcataacaggggtcatcttttcatgatcccgagggttgagccctcctctatcccatcagtgatgtgagcctcggataccttgaatcagaggtcagctcttctatgaggaacaacacgcacttgtcacgtctttcattgttgctttcaacacttgtgttcttctccactttcacacatgccttctcttcttctgtgtttccggaatcgaatcctattaaacctaggcactcacgtcttctcaggagtgctgtgcaacgagaaactcctacatctcagttgtctgaactatggtcacc

SEQ ID NO: 49387 - DNA, 359 bp, Glycine max
  Clone ID: LIB3139-122-P1-N1-A2
ggtggaagagaatatctccactgtgtgtgttgttatcataccctagaacaacgccaccttaaactgggtctcccttactttgtatatttttattaatttttcttaccctgtaaatattttcatcatcaggtggatgatcacaaggtcttgatgggttccaacggtggaagtagtaacaacaacaataataaggtattggaaaaaccaggtcaagatcagcttgtgcagcagcagcaacaacaacaagaagcccccaagtgccctcgttgtgactcatcaaacaccaagttctgctactacaacaactacagtttgtctcagccacggcacttctgcaaagcctgcaagcgctattggac

SEQ ID NO: 49388 - DNA, 346 bp, Glycine max
  Clone ID: LIB3139-122-P1-N1-B10
tgaaaaaaaaaattaaaaaaaaaaaaaaaaaaaaaaaaaaaggaaaaaaaaaaaaaaaaaaaaaaaaaaaaaaaaaaaaaaaaaaaaaaaaaaaaaaaaaaaaaaaaaaaaaaaaaaaaaaaaaaaaatataataaaaaaaaaaaaaaaatggggggccccccaattaatttttttttctcccctataataaaatttggttccctcctcctagttaacacaaattttttttttttgtagtttatattatccttgcttaaaaatataaaataatctttcttttttaaaaaattttttcccctctacaatttccaaaaaaaatatattccttttaatttaaattataa

SEQ ID NO: 49389 - DNA, 193 bp, Glycine max
  Clone ID: LIB3139-122-P1-N1-B3
cctcgagccgattcggttcgagccatgatgtgctggggttgaagctgaataggctgagtgtgcagggggagaagggtgggatgagatcttatgagttggatagtgctgattctttttgggttgcgaatgggtcgttggagtttccgtaggttgcggtggagattgagacgcatttgaataattataagaagga

SEQ ID NO: 49390 - DNA, 292 bp, Glycine max
  Clone ID: LIB3139-122-P1-N1-B4
tgaaataatgttaccttcctctctctaacctcactttaggtgctgcgattattctttcttttctaaaacctcaaaccgcaacacaacacaacacatcacaatacaagtttcgtattcgtaacgtaacttgtttctcccttcttcctctcctctctacgttttccgaattctgccctcactttacccaattccaattcctcacacccccagctaggggaattagggtttttgccgtcccatttatcgatgcgtcaccaccaccgattctagggattgctgcgatggcggaatt

SEQ ID NO: 49391 - DNA, 338 bp, Glycine max
  Clone ID: LIB3139-122-P1-N1-B5
ggctttttggaccttatgcaaattaaaatgttgattcaaggaggaaaaagaataatgtgggcataaaaatttctgctgtgatagcagctgttgcttgtgctttagcaatatctgcaataatcattctcctgatttctaaaagaaatatgaaataccagaagaagatttccaggaaacgaatgtctactaatgtatctatcaaaatagatggcatgaaagcatttacttacaaagaactggctattgctaccaacaaatttaatatctcaactaaagttggccaaggaggttatgggaatgtctataaaggcattttatctgatgaaacttttgtggct

SEQ ID NO: 49392 - DNA, 391 bp, Glycine max
  unsure at all n locations
  Clone ID: LIB3139-122-P1-N1-C1
ggatggcctaagccgaatccccaaccactttctttttcctccactccgccaccccttcctcctnctncaccgncacctncgnctncccctccccctcgcgcgtgcagctcacctnctnccttcgcgcccgcccgctgcgccgcctgggcttcgccgcggcggacccgctgctcgcggcgagtgtagcggcgcgcgtggcggcggtgagaggaggaggaaagggcgcgagggggggtgggtcnattgcgaaaaagagcgtgggggacctgagcgcggcggacctgaaagggaagaaggtcttcgtcagggccgacctcaacgtnccgctcgacgacaaccagaacatcaccggcgacaccagaattcgcgccgccattcccaccatcaaaca

SEQ ID NO: 49393 - DNA, 255 bp, Glycine max
  Clone ID: LIB3139-122-P1-N1-C11
aagcatcattttttttccaagactagagagatcacgttttgtttttttttaagaaccagtccgtcacatctttcttgatctctccatctcgggacttcataatatcatctgatggaaagaaaacacttgtctcttagcttgagggcaagacagttgatctttatttctgcgtgaagtcattcttatcatgcattgactttaccctaaagcttgtgtatgtttattagaagctcaaagcccattttgagaactttt

SEQ ID NO: 49394 - DNA, 389 bp, Glycine max
  Clone ID: LIB3139-122-P1-N1-D3
cggttcgaggattttggtggctatgaaaaggccatgaaggaaactgccaaggatttggatgagatttttggtgagtggttagaggagcacaaacaaaatagggcttttggtgagaacaacgttgatggaattcaagacttcatggacgtcatgctttccttgtttgatggaaaaacaattgatgggatagatgcagataccatcatcaaatccactttactgtcagtaatttcaggaggaactgaaacaaatattactactcttacatgggcagtatgtttgatattgagaaatcctattgtattggaaaaagttatagcagaacttgactttcaagttggaaaagaaagatgtataactgagtctgatataaagtagttaacatacct

SEQ ID NO: 49395 - DNA, 124 bp, Glycine max
  Clone ID: LIB3139-122-P1-N1-D5
gatttgtgtgtaagcaaagcaaaattgtaaaatagcatgtatgatttttaaacacatacatggtaatgttaaagctttcaattgcaaaattgtaaaaattatatgtataatcttatagttcctt

SEQ ID NO: 49396 - DNA, 419 bp, Glycine max
  Clone ID: LIB3139-122-P1-N1-D6
gtgattttctcaagagaaactttaagcagatgtctaatgttttgtgggtggctcctgaggacaaggcgagtttatggtcacaacttcattatgtttcgtgtaataatctggaaatgcaagaagcttatcttgtcaatctcgtaaatgtgttacgagaattgtatttgcaccagtccagaggaagctcgccaattgagaaggaaagctctctctcgtattgaatggctgcaaaaagctgatgtgcctaccatagcacagattgaagagttccattcgatgcagaagatgatgaatgctcctgattcaaatgataatattgatttactgttgagcattgatttgttgggtttacaaggagcaagtaaagcttttccaaacaaaatttgttttgatgataagcttgtgttggctaacacaca

SEQ ID NO: 49397 - DNA, 81 bp, Glycine max
  Clone ID: LIB3139-122-P1-N1-D8
agattctgttatttgtgttgcactacatggatgagattgaagtgtagtttgattatgaatacaacagtctgttatttgatg

SEQ ID NO: 49398 - DNA, 401 bp, Glycine max
  unsure at all n locations
  Clone ID: LIB3139-122-P1-N1-E2
ggctccaataccaggtgattttgccattggggttaagtggccacccataaacaatatgtgtgcatatgggctcaatcctggtatttcaggttctcgtcttttgggcaccattcctcagtccatttaacagcaaactgtttggaatcaaatggcaacagtgagaacaccattgaattttgattctagcaagcagagcttttgtcaattttcttttgaccttctcggtggggaattttagtggacaaaactggagattggatcacacttatacaaaattctncaattagtaacttgttgagagttgctgctttgaaagaaaggtgtttaatggtcaagattgtgatgtctgggaattgcgcagtcaaaaagagtgattgggcctcattggtacaagtgttttt

SEQ ID NO: 49399 - DNA, 330 bp, Glycine max
  Clone ID: LIB3139-122-P1-N1-F1
ggggcatacgcaacgcaggattagagaactgcgtagcgacccatcagagaagatcgcgatcttctgaaacatgtctggcgaagaggaagaaaacgccgcagagctcaaaattggagacgagtttttgaaggcaaagtgcttaatgaactgtgaagttgcattgattcttgagcacaagtatgagcagcttcaacagacatccgatgatcccatgaatcaagtttctcacgtatttgaaaagtcactgcagtatgtgaagcgcttcagccgctataaaaatcccgatgctgttagacaagttcgagaaattctcgccagatatgaattggc

SEQ ID NO: 49400 - DNA, 365 bp, Glycine max
  unsure at all n locations
  Clone ID: LIB3139-122-P1-N1-F2
ctcaacccgaatttgttaccaaaatagtaatatatattggtaaataataatttgattggtatttggccattcttttattctatcgaggtcctatgggacttagaggggaaatagagatgtagatctattgataattgctactattttgttacattaagaatgaaagaaatcttttgttaaaaaattaaacagacatnctaagatcccatgaataaagttttttaagtatttgaaaagtcactgcttaatgtgaagcgctttaaccgttatgaaaattccgatgcttgtagacaagttcgagaaattttctccanatgtggcccccccccctttggagtcttttccccccggaaaaaatttgcccc

SEQ ID NO: 49401 - DNA, 426 bp, Glycine max
  Clone ID: LIB3139-122-P1-N1-F4
tcgagctcaagccgttctaagctgatggaagaattggagatattgaggtctttggaacatggccaaccgcattgttagctgcacacaggaagaaagtgaaaatcgaaggacctgtatgtgattcatcacaagtcattggttggcatcttaagaatatgaacaatgaaactgatacaatcactcccccaattcatatttcaagttttgcttttaatagctccatcctttgggaccctgagagatggggtcgcacttcctctgttcaagacacttctcagaattcaatcaagttcgtgaagcaagtagttctagaagatgaggctaaattaaagggaattccaccagaagattgctccaaaatcttgctatggcgtttcaattttcgtgcccgaaccatcacaaatcactaatttctagattctggca

SEQ ID NO: 49402 - DNA, 418 bp, Glycine max
  Clone ID: LIB3139-122-P1-N1-F5
cgcgagcggcaaaaaatggcagatattcctcgggtgaagcttggaagccaaggcctggaggtttccaagttaggatttggttgtatgggcctaagtggagtgtacaacgatcctgttcccgaagaggttggcatctctttgatcaaacacgcattcaccaaaggggtcactttctttgattctgcagatttttatggagcacgtgccaatgaagttttggtcggaaaggctctcagggactttcctcgagatcaatttcagattgccacaaagtttgggattgtcaaaatggaaaatggtaatgtgatagtgaacggttcccctgaatatgttcggtcctgttgcgagggtagcctccaacgccttggtgtcagctacattgatctctattatcagcaccgtgttgacacaactgtac

SEQ ID NO: 49403 - DNA, 351 bp, Glycine max
  Clone ID: LIB3139-122-P1-N1-F6
tgcctcaatactttgaggttcaggctcagatggaaacaagggtgggtgaattgtctcttgatgatgttgaaactcctaaaggttctatgttggatcttaaaatttctcaatctaaaattgcacttcccaagaacacagttggaggaaccattctgcgtagtgatctattggcaaattttttgacagagggcaattttagagcaagtgttgatttgcagcgcactcatcgtattaaaagaatgattaataaggtggccacagttggtattcctgagaatacaggtatagccattggcctgtgctattaatagatcttctaggtcgcgcgccagttctgatatttactccatt

SEQ ID NO: 49404 - DNA, 423 bp, Glycine max
  Clone ID: LIB3139-122-P1-N1-G1
ggaaacaaagtaacactagaactcacaaaggacagaagaaacgcgaatgccaggagaactccaattaccacccgggttcagattccaccccactgacgatgagcttgtgaatcactacttgtgtagaaagtgtgctgcacaaaccattgctgttcccatcatcaaagaaatcgatttgtacaagtttgatccatggcagcttccagagatggctctttacggtgagaaagagtggtactttttctctcctcgagaccgaaaatacccaaacggttcgagaccgaaccgggctgccggaagcgggtactggaaggctaccggagctgacaaaccgatcggaaaaccgaaagcccttggaatcaagaaagccctcgtgttctacgcgggcaaagccccaaagggagtgaagaccaaatggatcat

SEQ ID NO: 49405 - DNA, 393 bp, Glycine max
  unsure at all n locations
  Clone ID: LIB3139-122-P1-N1-G2
ggggaaattttaataaaccgggaccacaggttgccgaaccttaaaaccggaaccaaaaccaatcggtacttggttttcaaaaatttctcatttctttctacctctttggggtccaattcttaaagggaaggaaatcactctctgtgctggtcacagacttcgtgaatcattttcttttccactcctaggttatttgctgaacactctcctatttgatataggacttcgtgtcagatttaaactttttctgtttctttctcagntctctgnttaatttcaagttcaagctggtgaaattttggattagtgctcccactctcctatctggtataggacttcctgggtagacttttctacttctctcctttctttcactctcttcttctcactgat

SEQ ID NO: 49406 - DNA, 109 bp, Glycine max
  Clone ID: LIB3139-122-P1-N1-G3
ctaatgtacaaaaaaaataagagtataactcctttaaattctttaactgacccaccttgtatactgtatcatcaacgataatggactttaaattgcacaatttgctgat

SEQ ID NO: 49407 - DNA, 346 bp, Glycine max
  Clone ID: LIB3139-122-P1-N1-G5
ggtttaaaaaagttagcaaattgtgattttttaaagagaaactttaagcaaatgtctaatgttttgtgggtggctcctgaggacaaggcgagtttatggtcacaacttcattatgtttcgtgtaataatctggaaatgcaagaagcttatcttgtcaatctcgtaaatgtgttacgagaattgtatttgcacagtccagaggaagctcgccaattgagaaggaaagctctctctcgtattgaatggctgcaaaaagctgatgtgcctaccatagcacagattgaagagttccattcgatgcagaggatgatgaatgctcctgattcaaacgataatattgatctac

SEQ ID NO: 49408 - DNA, 339 bp, Glycine max
  Clone ID: LIB3139-122-P1-N1-H2
gggtaggggccaatatgatgctgcattggatgtaaatttgattgaacctcgaatgctgacattgtttgacaaagcttcatctctcattcttgcaaatatcaaaatgggcacattggatgatcttgatgaccttgaggtataccctcctcatattcccgatctttcatcaaagggtccattgattttatctggaaaatacaagggaaattttcccaaaactcttaaagtcaaaagtatcttggctgatttcagtaattttgtagtagatatgaagatacaaaatgcttatgacattcctgtgcaaaagatttctgcaagagatcaaatagagcatcttac

SEQ ID NO: 49409 - DNA, 360 bp, Glycine max
  Clone ID: LIB3139-122-P1-N1-H3
cttacacaatagcttagccaccctcgatcactagctagttctgatttctctaatatgactatggtggtcctcacaccccttttggccatagtcggtattattctcctacttaaactcgtctatgacaacctctcatgttactggctcacaccactacgcataaaaaagatgatggatatgcaaggtgtccgtggccctaaaccttgtttcttcacaggcaacatcctagacatggcttcccttgtctccaaagcaacctcccaagacatgaaaaccataagccatgacattgttggccgtcttctcccacattttctactttggtctggccaatttgggaaagaggtttctatattggaa

SEQ ID NO: 49410 - DNA, 678 bp, Glycine max
  unsure at all n locations
  Clone ID: LIB3139-011-P1-N1-C4.F3
ctaggttgagagagaagcacttaatgaagctattgtagggnggagaaaaatggttttcatcacttttaccagaaacaagaggcttatgcctttcagaagagcagactgtcaccagtatacatagaagaccaagaattggaggccatcgactaatcgggatgcgaactcaacctcaaaaactgactagaaaatgtgaagttacagcaattcttgttctatatggtcttcctaggtaactagtggacaatggaaactttgctttttgtccccttcgaattacagctgattgattcccttttgaatataattgtgagttcagatatttttccaatacccataagacacagtaccaatgacagactataatgttactttcttctcattgatgatgttcaaacttcattataggagttctcatattttaatgggatgcaggttactcacaggtgctatacttgcccatgagttgatgcatgcatggctacgccttaatggttatcgcaaccttaatcctgaagtagaggaaggcatttgtcaggttctttcgtatatgtggcttgagtcagaagtaatgcctagctttcaaaacatgccatcaacataacacagtgctgcctcttnctactcctcctcaaagaaaggtgcaaagtctcatgttgaaaataattgggtgaattt

SEQ ID NO: 49411 - DNA, 372 bp, Glycine max
  unsure at all n locations
  Clone ID: LIB3139-011-P1-N1-C4.R3
ggctggccatacaccggttccatttagcanatcctgccactctaacacaaactccgtccatcttctagtctatagtattttatgttcaaaggctccaatctttcacaactacagcagcgagctgtattatcatattcatgagatggacaataatttgggaccaaaggggtggcacctatactcaatcaaaccagcagcatttataggaataaattggaagcaaacttcacattttggatgattcaactctttaaaacatgacttgtgatatggatgcttccctgacaaggaaaactcacgctctgtaatggggtaaccacaagagtgacagcgaaaacaattggggtgaaaatagtatccatgcagcccaaa

SEQ ID NO: 49412 - DNA, 673 bp, Glycine max
  Clone ID: LIB3139-020-P1-N1-D12.F3
cctgtttccacattattcgaaggaagtggaggagatgaaacatgtaacaaagcaagaatttattgcatcattgcggaggaaagtagtggtttctccaggggagcttccatatacagaggtgttacaaggcatcatcaacagggtaggtggcaagcaagaattggccgtgtagctggaaacaaagatttatacttgggaacattcgcaaccgaggaggaagcagcagaggcatatgatattgcagccataaagttcagaggtgcaaacgcggtaaccaactttgagatgaatagatatgatgtggaagctataatgaagagttctcttccagtgggtggggcagcaaaacgcttgaggctttcccttgaatcagagcagaaagctcctcctgtgaacagcagcagtcagcagcagaatccacagtgtggtaacgtgagtggtagcatcaatttctcagccattcatcagccaattgcttcaatcccttgtggaattccgtttgattcaacaacagcatattatcctcacaaccttttccaacattttcaccctaccaacgctggtgcagcagcgtctgctgttacttctgccaatgcaaccgcactaactgcactgccagcatcagcagcaactgagttctttatttggcctcatcagtcttattgatctaatc

SEQ ID NO: 49413 - DNA, 322 bp, Glycine max
  Clone ID: LIB3139-020-P1-N1-D12.F4
gccattcatcagccaattgcttcaatcccttgtggaattccgtttgattcaacaacagcatattatcctcacaaccttttccaacattttcaccctaccaacgctggtgcagcagcgtctgctgttacttctgccaatgcaaccgcactaactgcactgccagcatcagcagcaactgagttctttatttggcctcatcagtcttattgatctaatcaaaactagaatcaaaatctttttctaatttcctggttatgctaacaaatcaaacgccatagtctctggcacagtttagctgacccccctcctctattattaacct

SEQ ID NO: 49414 - DNA, 303 bp, Glycine max
  Clone ID: LIB3139-020-P1-N1-D12.R3
tgacgcccttttctggcttgaccctcccttctgcaactattgtcccatagatgcgcttcatatcttcctgtccatcggtgcctagtaacacctctgtaaatagaagtccgctggccgaaggtatccacgatcttcttcgagctattggactccgccgcgacaacggccttctcggagctcagtgcaacggcgagcgacaaggttccggttgtgccaccggaagaacgcggcgaactcgttgccggaggactcaatagagtgagtcccgaactcgctggcctgcgcttttccgatggatgcaga

SEQ ID NO: 49415 - DNA, 655 bp, Glycine max
  unsure at all n locations
  Clone ID: LIB3139-020-P1-N1-D12.R4
aagcctcaagcgttttgctgccccacccactggaagagaactcttcattatagcttccacatcatatctattcatctcaaagttggttaccgcgtttgcacctctgaactttatggctgcaatatcatatgcctctgctgcttcctcctcggttgcgaatgttcccaagtataaatctttgtttccagctacacggccaattcttgcttgccacctaccctgttgatgatgccttgtaacacctctgtatatggaagctcccctggagaaaccactacttttcctccgcaatgatgcaataaattcttgctttgttacatgtttcatctcctccacttccttcgaataattggaaacagggaagttggtggtagcagtgggaccccagtactttagagctgccaaatcataagctctcgcggccttttcttccttatcatatccacccaaataaacttgacgcccttttctggcttgaccctcccttctgcaactattgtcccatagatgcgcttcatatcttcctgtccatcggtgcctagtaacacctctgtanatagaagtccgctggccgaagtatccacgatcttcttcgagctattggactccgccgcgacaacggccttctcggagctcagtgcaacggcgagcgaca

SEQ ID NO: 49416 - DNA, 237 bp, Glycine max
  unsure at all n locations
  Clone ID: LIB3139-024-P1-N1-B9.F3
gtaaggctgtaataataaattatgggagaactcttacatccagactttgcttagacaccaggaaagggtatggtgtgtgtgntggaaagtgtatctttctttccatatgttttttttccacctagtgtacagtggtaccttctagctatagtgaggtttgctgctgttgcacctcaaactcaaatatgtatgtaatgtttatataatgtgttaattaaataatcttttttggtcatt

SEQ ID NO: 49417 - DNA, 684 bp, Glycine max
  Clone ID: LIB3139-024-P1-N1-B9.F4
cccatggttaggatcttcatccatgtattcatagtcggtagcagcaaaattatcaaaacgaggagggctgagtagcattccttcagccatattgaccagaatattcggcatgtcaaagatcaagtcctcatccacaaagtgatttaagtttccccctgaaaactcttccgccaatgaaaccgaaacatttcctccttggcttccttccagtgcatcattcgctgctccgacagcggttgcagctagtgctgcagccatctgaatgtcgtgagctgcagatgatgcagggatagggagggaggaagccgagttagggaagttgagctcagcatccttacccttaagagcaagcgctgccacgtcataggcaatagcagccatttcaggggtggcaaatgtccctaaccaaatcctgttaggttttttgggctcacggatttcagaaacccatttaccactactcctacgcctcactccacggtaaacagggtggcgccctgtgttaccgttggaggccctgctgcttgatgtaccgttgctggaacgcatgttggtggtgatgtgaggaaaagtaggtctcggtatctctagtgattagtctctgattctcggctaagtgaacctgaaagtagttagatgtttgcagttggcagttgaaggtgaaggtgaaagtgagtaacttct

SEQ ID NO: 49418 - DNA, 300 bp, Glycine max
  unsure at all n locations
  Clone ID: LIB3139-024-P1-N1-B9.R3
gtggcaagtgtcccttaacctaatcctgttaggttttttgggctcacggnatttcagnaaacccatttaccactactcctacgcctcactccacggtaaacagggtggcgccctgtgttaccgttggaggccctgctgcttgatgtaccgttgctggaacgcatgttggtggtgatgtcgaggaaaagtaggtctcggtatctctagtgattagtctctgattctcggctaagtgnaacctgcaaagtagttagatgtttgcagttggcagttgaaggtgaaggtgaaggtgagtaactt

SEQ ID NO: 49419 - DNA, 319 bp, Glycine max
  Clone ID: LIB3139-037-P1-N1-B3.R3
ttcttgaactcattcaagcaaacagcgcattcgcagaatcttctctctccaaagtctctatcatccccttgttgtgctttgtattgagtcactgggattaaccggatcagtgcctcatctagtccacgagtatctgtggctggtgagtatgttggtggtggatcttcacgccttctagatggagagaaacgtctcagaacatcaattcgatgccaattgaggcagcacttgatcacaaagatgtagtagctcacaagcaagaatgctgtggccattattcctattatggcaattgcaatgatgggaaaactggtgctcg

SEQ ID NO: 49420 - DNA, 671 bp, Glycine max
  unsure at all n locations
  Clone ID: LIB3139-040-P1-N1-D1.F3
agctcaattgggcctccaatgccaaactcaagtttggagcttggtgttgggagcaatggttttggacaaggtttaagcactgtgccttcaacaatgcctgattttggggttggaatatcaagccctttagccatggtgtcaccttcaagtactagaccaaccacaacagcattggtgactccttctggctttgacaacagatcaattgagaggtctattgttcttgaacttgctttggctgcaatggatgagttggtgaagatggcacaaactggtgagcctctttggatcagaagcttggaagggggaagagaaattctcaaccatgaggagtacacaaggactatcactccttgcattggcttgagacccaatggctttgtcactgaggcttctagacaaactggaatggtcatcataaacagcttggcccttgttgaaacattaatggactcaaatcgttggtcagagatgttcccttgtatgattgctagaacctcaaccgctgaagttatatctaatggaataaatggaactagaaatggtgcccttcagctaatgcatgctgagcttcaagttctttctcccttggttcctgttcgtgaggtcaattttctacgcttttgcaagcagcacgcanaggggttatgggcagtggtagatgtgtccat

SEQ ID NO: 49421 - DNA, 414 bp, Glycine max
  Clone ID: LIB3139-040-P1-N1-D1.R3
gttcttcgagtgaaatttcaccgatcatagcaggacctccacagtttgagcatatgggatttctcatggcttccctcatagacatgttttcagctctaagcttgtcattctcttgccttagcagcgagttctcgtgccgttccaattgtgtcttcatttgtgttcttcgattttggaaccaaaactttacttgcctcgtttccaaattaagccttctgctgagttcaagcctttgcttctcatccgggtgaggacactccttgaagagcgattcaagctcttgaatttgctgaggagtgtgtcggtgatagcgttttttcctcggtgggttgtcggcagcatcaaaatcatcaccagaaccaccatccatgttgtcactgccagatctgctttcatgctcctcttcccggctcc

SEQ ID NO: 49422 - DNA, 210 bp, Glycine max
  Clone ID: LIB3139-059-P1-N1-A2.F4
tttaattattttttttacttcttatttcacttgaattcgtttcaatccattgattaaaactggcttcccctccttacttgtcttacaattccaaaaaatttggtgtgctaattttgacattgtgatgactgattgtgccacatactattgatgtattatgattgtactttatgaagatataagaaacactgcatctgtttttcttttatc

SEQ ID NO: 49423 - DNA, 143 bp, Glycine max
  unsure at all n locations
  Clone ID: LIB3139-059-P1-N1-A2.R3
tcttggtgtctgttgttggattgagcagagcagaagagggtgctttatgagnaaatctaacaagcaggtggaggaggccagnagnatgaaaaacaagacagcaagaaccactatgatgaatagaacagcaggactaattctag

SEQ ID NO: 49424 - DNA, 279 bp, Glycine max
  Clone ID: LIB3139-062-P1-N1-C12.R3
acctggggggaaagtaataatagtcccaggttgagaaggcaagagatgcaagcaaacaaatcattgaacagaatttcaatttttctgttttgttgtttccttctgtgtctaatcgttttctgagcaagaaattggattattattctctattgccctgttgtataattttaaagaacacgggtgttagcttgagaatgagatagattgagcaattgtatgtagggtaaaagaactggtgttcttcatcatttactataatatatttgagctcgatttttc

SEQ ID NO: 49425 - DNA, 396 bp, Glycine max
  Clone ID: LIB3139-076-P1-N1-C2.R3
gaagttcttgctgaaggagccactctccttgaagagctgctcatagtgaggcttacagtaaagaacaccttccattgaggaatagttactcagctttaatgttcctttgcagtgagagcatctgaagcaagctttgtgataagcagtaccatcagcagaaagctgatcaacgggataaaccgttttctcacaagccttgcacttttgctgggtaccgataaaagacattgctatggcttttagatctaaattcaccaccaattccaaattcacaaggcactggatcgacttcagagactacttttcttgttagatttgcctgtcagtaacttgagcttgtgaagagaaagtggtgaatggtggatcggttgtgatctgaagctttaaactgaaaag

SEQ ID NO: 49426 - DNA, 339 bp, Glycine max
  unsure at all n locations
  Clone ID: LIB3139-089-P1-N1-G3.R3
tcggcggcccatttcccgaagcctctgcctaactcctctgtatttcttcctttgttcctcgggngaaaagttgcatcccaggcatcctgcgatgttgcactcgcgaacgtgtggatgctaggcgggggtggcggcataaggctggcggaagaaagaggcggggaggagtgcgggaagcggaattcagggacggaggagctggaggtagagccggagacgacgttggtgagggcggcaacgatgagggagaattcttggtcggtggtgatatgggcggggaagaaggaggaagaggaagaggacatggtgattgtaatttggcgcgttaaagctcaagcc

SEQ ID NO: 49427 - DNA, 248 bp, Glycine max
  unsure at all n locations
  Clone ID: LIB3139-090-P1-N1-C11.R3
ggcgctcccgtgtttggttgccaaacattanaaccaaaggctaaacagggatttgcaagtagcacatgnagcatggatgaattatgacaatttaggaacatacaaagattatcatttagattctagagtatctttttagaaccactcactatctcttttataatatgtagtgcttgtcattagataatcgattattcaatagcttagctataaatataaatgtaaagactaaagagtagttgttttat

SEQ ID NO: 49428 - DNA, 520 bp, Glycine max
  Clone ID: LIB3139-090-P1-N1-C11.R4
gctatagccatcatataaacacatgccaaagtcacagttatctaaggcctgaaattgactagtagtgtatccaaaaggctgactcatatttgggatatttgctgattctgaagaggaaatgcatgaactattgtggtgttcagagtctgagttctgctcatgctgattcaaatgattgagatctccatggcaagtgatttgtattgttggtgttgtcccaatcccaaatgatgaataatgaggaacagtaacaccatcaaaaggtaaaggaattgcttggtcttgggttgacatggccgaaggagatgattcttgtgatttatgaagacatcttgtcatctgtagacccttgacaaattctacaaatcctgctcttctgtgatcctcaaatttcgcatatattgcttgtttctgaatccttgctctgcaatagctctggatttcattgtgtgatctgcctgccagctgacgcgcaattttttctcgagccgaatcgtttgcttactgactcgttcatgcc

SEQ ID NO: 49429 - DNA, 321 bp, Glycine max
  Clone ID: LIB3139-099-P1-N1-E9.R4
ggagagagttctgtacatctgtgaagcaaaatactataaacttaattgatagtttcctctacttgtttggaaccaacccaagagacaatattttgttttttttttatatataccaagaaaatccagtgatgaccacactagtatgaacaaaaatatagactcagttactccaagttcaaactcaggaaaagagaaagagagagagagagaagaaggattcccttctctctgtatctgaagcagtgcaaaacaataccggaaaccacaaaccaaggagaaccctacggcaaactctctgacgttgctctttctgtcttttcc

SEQ ID NO: 49430 - DNA, 311 bp, Glycine max
  Clone ID: LIB3139-100-P1-N1-C9.F3
ggggcggtgggtatgacagccttgattcaaacgcttgcaaagacagaacagcttgttaagagtacgaattcatattagcagatcggcgtggaaaactacggcgcataaaccagcatttttttttttttggcatatctgtcaggaggggggctgcgacaattggcaccatacttgcaactgcaagttatgatgtataatgagcaatccagtcccacaagtctgactgtaagccctggtgctatttgccaacgatggcgatgtagcagattgaatagacgatgtatctgacgctgtcaaacccattatagaag

SEQ ID NO: 49431 - DNA, 323 bp, Glycine max
  Clone ID: LIB3139-100-P1-N1-C9.F4
tgctgaactaaggctccgtgtatttcaaggccttgcagcattttttttcttttacttgactattttacactatttttgcttttgtttttttttaatattttaatgtagtaagtaaaggtagattggcatgaccagggaagaaggagacggttttgtgatttccttctcggttgctccatccgttatgagctatgtttttcagctccaaggatggttcatatatatatatatatataatcatattacttcatttgtagtttgtacgctatcatgttatgtatcattttttttgttgttatattacatatccagcactttacagt

SEQ ID NO: 49432 - DNA, 277 bp, Glycine max
  unsure at all n locations
  Clone ID: LIB3139-106-P1-N1-D11.F3
tatcacactcgccggcgttgngaaanagggttcaattgggttggtggcgaaacgactgtggatttgactctgtggtgaaactgatgaccacttaggttctctgcaaaccagagaggaacttgcaatttcgatctgttgcaaaatattatatatactaatagtctaaagatgtagttcatcatatatactagtactgatacattcaaaagttatatagcgtttgctgtatggttgagattttcgtcaaaaacaagctgtatcataaatcttttctgtt

SEQ ID NO: 49433 - DNA, 436 bp, Glycine max
  unsure at all n locations
  Clone ID: LIB3139-106-P1-N1-D11.R3
agaaaaatgcttctccgccgcctgcgtcgccgcaaactgaatggccctaacggaacacgtccgcgagttaaggcggggaaacgaggtggcggcgttcgggaagtttaaggaagcactgtcgcccttngaaagccaaggcggcaacatcgtacgctatagcagccatgtcggggtgcgcgaatgttccgagccacacccgcgcgtttttgttgttaggttgtcgcagctcgcttacccacttcccgttcctctgcctcactcccttgtacaccgggtgtcgtgtctcgtggaacttcttcctccctgccctccgcttctgcattttcttctgtgttttaacttatttaggcttgggacgagtggttaccaaaaacaaatgtctcctaagatcatgtatgaggataaatatatccaattcaatggactaaaaatccca

SEQ ID NO: 49434 - DNA, 396 bp, Glycine max
  unsure at all n locations
  Clone ID: LIB3139-119-P1-N1-H6.R4
ttgcttgntagncattgaagaagagtctttggtgcttgcttgcagcttgttgcagcatgacttcacgtacatttggcacacaagcagcctcaccgcgcacaaacactgttgctggagctctctcacacacgtcacactgaattttcatgttaattcttctcttccttctacaacaccaaaaacttggtcttcttttagctaacaactttttcactacaagaaatattggaaatattaaagaacccttaatcagacacagtggttttgtaaagccaaaaatggagaacgatggtgcagaaagattaggacatggtgtggagatgagaacaaaaaaagaagaacatagttaacattgaagtagtactatactacacagttggtatttaatgtgggaag

SEQ ID NO: 49435 - DNA, 497 bp, Glycine max
  Clone ID: LIB3139-099-P1-N1-E9.TA
atatcataattataaaccaaacacaaataaaaaaaggcccaaataaaagtatatatatacccatgacgaaaaaaaaaaaaaaaaacccaatatttttaaaacatatggagccaacccttccaaagggttggggtttggttatttttggaagaagtgaagcaacttcccaaaccaacaaagtttaagatatcaatgtgagaaaaaaggctaaaaccccaaaaaactcttttcaaggcctcaataatgtttcctctggcacccccaaccgcggggggtgtttttttcattggattcccccccccaccaccaaaaagggccccaaaaaaaaacccctcaaaaggggaaaaaaaaaaaaccattatattgtgaaagagtgaaggggaaacaccctttcccacaccccggacagctttatttcccaaaagtaccaaaccctggaaaggggggggcatctggtgggcacctgaggacaaattcaaaaccgcatttgccaacac

SEQ ID NO: 49436 - DNA, 603 bp, Glycine max
  Clone ID: LIB3139-117-G9-F1B
gacatttgcgccttctttcttgcaatcgcgtttgaataaaaacaaaagaaattcctcttcttattctccctcgcgcgattcatttcattttctctttggaataacctgcagggttgcttccatttcaacatgtagagcgcgctctttgttgttttcatttctgacaagttctttttttttgttgcgttgcaaaatccttctcctcgaggcggcggcatggaaagcattgccgcgcagctgaagcgcggcatctcgcggcagttctcgtcggggtcgctgcggaggaacctctcgtggcagttcaacgggcaagccttcgctggaatcttcgccggaacaacaagcgcttcagcttcggcggcaatccttggttgattcgattcggcggaagcccttgttcgggaaaggcgaagttaaccgtgccggagaacctggattccaccatgcagctcctcttcatggcctgcagcggcaagttaaaggaatttaagaattgcctcaacaaaggcattgacgtcaacagcatcgacctcgacgggcgcaccgccctcaacgtcgccgcctgcgaagccacgtcgaagtcgccaggctacttctcagccg

SEQ ID NO: 49437 - DNA, 233 bp, Glycine max
  Clone ID: LIB3139-117-G9-R1B
aatgtcagaggaaaggaacaagcaaaaagagagaatccacaaagtaaaaaaaaaaggagaaaaaaaaaaaaaaagcattcccaaaaataagaagaagggggggaaaaacatcaaccccccaaaggaggggaaaagaggtgggggaggatcccaccgcaaagagaagtcgcctagaggggtgaggcttaaatgatgtagaagccacggggggaggaaaaaaaaggtgacccccc

SEQ ID NO: 49438 - DNA, 491 bp, Glycine max
  Clone ID: LIB3139-072-F12-F3A
agagcaccgtcaaagcgacgaaggaatcgcgtccgaaacgaaacaaaatcgcaaccgccgttgctccgaagaaaaccgaggcggttaaaaagcccgcgaagaaggtcgggccgaagaaaacgaagaaagtgtcgacgcctgcgaagcccaagcagcccaggtccattaggtctccgaccaagagggcccgtaaagctgccgtcgctgcggcttgatgtttgatgtttttcttgtttagttaaaactctggcatataatatatgtagatatgaaaaggtgtgtgttaaccttgttgcacaatcttgaatatagttgtgtggtttaggatcgtagatagtttagtgttctgcaatgttcgctctaagaagtgatcaattggagatgaattttactgttatcaaaaaaaaaaaaaaaaaaaaaaaaaaaaaaaaaaaaaaaaaaaaaaaaaaaaaaaaaaaaaaaaaaaaaaaaaaaaaaaaaaaaaagggggg

SEQ ID NO: 49439 - DNA, 586 bp, Glycine max
  Clone ID: LIB3139-105-E2-F3A
agggatctgtgaccattgccaacggtggtgttctgcctaacattcaccagaatttgttgcccaagaaggtcgctggcaaggggaagaccgagattggatctgctagtcaggagttttagatttaaggctcttgttttcgtatgtagttggttgccttatatagtaagattaggattgacattggatgatgtatagtcctttaacatttgaaaataattagttgttttctaacatggttcctgcatagttttcatttatttgagtttctcgtgaatcgagatatctattctctttttatttgtgtgtttgggcataattttagtgtggtgtttatgttgaaaaaaaaaaaaaaaaaaaaaaaaaaaaaaaaaaaaaaaaaaagaaaagaaaaaaaataaaagaaaaaaaaaacccgaaaaaaaaaaacaaaccaaaaccggggggggcccccacttaggggattctgaaccccggaaataaattccggcccggaccttgaaggcttcccacttttccttatggggagccgtttaaaatctggcccaacatagggccatgatggtttcctggggaaaattgttttccc

SEQ ID NO: 49440 - DNA, 735 bp, Glycine max
  unsure at all n locations
  Clone ID: LIB3139-117-G9-F3A
ggggggcgctgcggaggaacctctcgtggcagttcacgcgccaggcctcgctggatcctcgccggaacaaccagcgcttcagcttcggccgccagtcctcgctcgatccgattcgccgcagcccctgctccggcaacgccgagctcaccgtgccggagaacctggactccaccatgcagctcctcttcatggcctgccgcggcgacgtcaagggagttgaggatttgctcaacgaaggcatcgacgtcaacagcatcgacctcgacggccgcaccgccctccacgtcgccgcctgcgaaggccacgtcgaagtcgccaggctacttctcagccgcaaggccaacctcgacgctcgcgatcgctggggcagcacggcggcggccgatgccaaatattatggaaatacagaaatttattacatgttgaaggctcgtggagcaaaagtaccgaaaaccaggaagactccaatgactgttgcgaatcctcgtgaagttccggaatatgaactcaacccgggagaactacaggttcggaagagtgatggtatttcaaagggaacataccaagtagctaaatggaatggcacaaaggttgcagtgaagatacttgancaggacagttattcagatcctgataccataaatgctttcaacatgaactcacattattagaaagggtgcgacatccgaatgtggtccagtttgttggagctgtcacccagaatatacctatgat

SEQ ID NO: 49441 - DNA, 435 bp, Glycine max
  unsure at all n locations
  Clone ID: LIB3167-027-P1-K1-B5.F5
cgccgccgcggcaggcatgaatacatcatagcaacaacactcatcatttccttgaccgagatgaggaggaggcggaggcccatcatgatgacgaggagcagcagcatcatattaataacatcatcataccctcccctgctgatgctgatcgaactactactactacttcttcttctactactactacatcacaagaaggagcagctgctgctgctgatgacgacgactaccaacgcaacaacagttgttgtagtagcagcaacagcaagaacaagcaccaggagctgcttcctcctgctgaagaagcagatgttgctgctgctgctgatgacaagatgatcttgaggcggcgaacacgacaacgacgacgtggaggaaaaagaactactgcttcctgaagaagaggaggaggagtcgtctactggtagtangaag

SEQ ID NO: 49442 - DNA, 392 bp, Glycine max
  Clone ID: LIB3167-023-P4-K4-A1
gataactagaaacagtgtgatgaaaatgaaggtccttgttttcttcgttgctacaattttggtagcatggcaatgccatgcgtacgatatgttccctctccgaatgaacactggctatggtgcccgtactccggaggtgaaatgcgcaagttggaggcttgctgtggaagcacacaacatctttggctttgagaccattcctgaagagtgcgttgaagcaacaaaggaatacatccatggcgaacaatatagatcagactccaaaacagttaaccaacaagcttacttttatgccagagacctcgaaatccatcccaaggacacatttgggttcagtatagatggcaccgtactctctaatattccatactacaaaaaacatggatatgggg

SEQ ID NO: 49443 - DNA, 105 bp, Glycine max
  Clone ID: LIB3167-023-P4-K4-A10
gaactaggtattgcatttgtggtttttacatactgagtttatttatcatttacacttttctttaacataaaaaaaaaatggtttttaagaatttgcgtttttgtt

SEQ ID NO: 49444 - DNA, 423 bp, Glycine max
  Clone ID: LIB3167-023-P4-K4-A11
cccacgcgtccgcgaaaggatctcgaagacccaccaacgcacgaaagccgggatctttcagaaaatggattcctattcgaagggtgcataaccgcatggataagctcacactaacccgtcaatttgggatccaattcggttccttaggaggtatcgggaaggaattttggaatgtaataatatcgattcatacagatacagaagaaagggttctctattgattcaaacgctctacctacgagatagggatagagaaagaggaaaaaaccgaggatttcacatagtacttttggtcgaaaaatcgatctgatttttttcgtacttttcgctcaatgatgaaatgggtcagattctacaggaccaaaccttggtgggagttaaggaatgatggaagaaaagaaataaaaaaaagttaataaaaat

SEQ ID NO: 49445 - DNA, 364 bp, Glycine max
  unsure at all n locations
  Clone ID: LIB3167-023-P4-K4-A2
tctcattctccctttcctctccgaaccctcgatcactctcacgcgctcctatattcgctcctccaccgtcgctctctcgaacaaccacaacaccatcttcatcacatggcaaacgcagcatctggtatggcagtccatgatgactgcaagttgaggtttttggagctgaaggcaaaaaggacacanccgttcatagtttttaagattgaggagcagcagaagcaggtcattgtggagaagcttggtgagcctgcccagagctatgaagatttcactgccagccttcctgctgacgagtgccagtatgctgtttatgattttgagtatctgactgaaaggaatgtccctaaaagcagaatttttt

SEQ ID NO: 49446 - DNA, 411 bp, Glycine max
  Clone ID: LIB3167-023-P4-K4-A3
ctcaccacttgttggggtcctgcaggatcatatcaacgactggaggaaaacagcactttgtttaacatccattttctttcttgctgctgtaatatggttcataggaatctttttgaaaagtgatgtatatgacaaagatgatgaggagcaatctgccacaactagaggaggaaaactgacgccattgcttgacggcagcagtgacactacatccagtcaagtttaattcttttcaaattctagtactataactatgcttcaagtgtatattaacttctagtgtgaagagggtaaaagtcggtagcatactagcatctttactactactaccagtcatgtggaaaatggtggacgggggtttgatactatgttggatatgtatatcatatatgcacatgtggggctgatcac

SEQ ID NO: 49447 - DNA, 406 bp, Glycine max
  Clone ID: LIB3167-023-P4-K4-A5
tttctctttgtcgcaaagagaagagatctgcctccttttttttatcaaatctatctcttcttcaagaatagttgaaaatggggctgtctttcaccaagttgttcagccgactgtttgccaagaaagagatgcgtatactgatggtgggtctcgatgctgcgggtaagaccaccattctgtacaagctcaagcttggagagattgtcaccaccattcccaccattgggtttaatgtggaaactgtggaatataagaacatcagcttcactgtctgggatgttggaggtcaggacaagatccgtcctttgtggagacattacttccaaaatacacaaggacttatttttgtggttgatagcaatgacagggaccgagttgttggagctagagatgagttgcataaaat

SEQ ID NO: 49448 - DNA, 426 bp, Glycine max
  Clone ID: LIB3167-023-P4-K4-A8
cccacgcgtccgggcaacagaaacaaaagtggcagtattaggtggcatcaccgaagtgcagggagctgccaacagcgtcgagatcaacaatctcgctcgctttgctgtagaggaacaaaacaaaagagagaattcagttctggagtttgtgagggtgattagtgcacagcagcaagtggtttatggagtgtatgactacataacattggaagcaaatgatggtgagaaataaagtgtggattaagcagtggtatgaagaatttaatgccaagtgttgtgtgactagtgccgatattctgtttatgtttgtgagaatttgattgtagggaatgtttttaaaagctgaatttttttcattgatttttctttgacacatttagggtgtagagtttgtttttttacgttttttttttatactgatttttt

SEQ ID NO: 49449 - DNA, 470 bp, Glycine max
  Clone ID: LIB3167-023-P4-K4-B1
accgggtggaccacgcgtccgagcaaatatggcatactctaacttcaaaaggtggaaactagcctgcagatcaaggcttctgctgaacagttctatgatgttttttgcaacaagccacacactattgccaacatttcaccagaaaatattcagtcagttgaagttcataaaggtgaatggggcaaagagggatcaatcgtctcctggaactatttacatgagggaacagtttgtgtagccaagcaagtgcttgaaggcatagacaaggaaaataacaaaatgacaatgaaggtcatagagggtgacgtgctgggactctacaagagcttcaagtctaatttgcaagttactccaaaaggaaagggcagcgtagtgctttgggcaatggaatacgagaaacatgaggaccacattcctgacgctcatacctttgtgcaactggctgttgtgggtagcaaaaaaattgatgc

SEQ ID NO: 49450 - DNA, 432 bp, Glycine max
  Clone ID: LIB3167-023-P4-K4-B10
atcgagataactagaaacagtgtgatgaaaatgaaggtccttgttttcttcgttgctacaattttggtagcatggcaatgccatgcgtacgatatgttccctctccgaatgaacactggctatggtgcccgtactccggaggtgaaatgcgcaagttggaggcttgctgtggaagcacacaacatctttggctttgagaccattcctgaagagtgcgttgaagcaacaaaggaatacatccatggcgaacaatatagatcagactccaaaacagttaaccaacaagcttacttttatgccagagacctcgaagtccatcccaaggacacatttgtgttcagtatagatggcaccgtactctctaatattccatactacaaaaaacatggatatggggtggagaaatttaactcgaccttgtatgatgaatgg

SEQ ID NO: 49451 - DNA, 427 bp, Glycine max
  Clone ID: LIB3167-023-P4-K4-B11
cccacgcgtccgcccacgcgtccgaaaaaaactcttatctatgcctatgtctctgtctctgtcaaccgtgcctgcgttcaattctctcacaatggctgaatcctgcctcctatctctcccttccctcttctacgccaaaaacaaaaccctttctctctcaattcccactaatcctctcaacctgcaattcccatgctcaaactcttcgctttttcccctcaccaccaagactacgcgccactcttctctcctcacattcgtggctcagacatctggttgggccaaagaaggggaggaggaagaagccgcgtgggagaaccaaggcgacactgcgtggggaactgaagaaggtggcgatgatatagaagatggcggcgaagggggtttcgctgaagaagaagctgaagaagttaagatcttcgttggg

SEQ ID NO: 49452 - DNA, 421 bp, Glycine max
  unsure at all n locations
  Clone ID: LIB3167-023-P4-K4-B12
gataactagaaacagtgtgatgaaaatgaaggtccttgttttcttcgttgctacaattttggtagcatggcaatgccatgcgtacgatatgttccctctccgaatgaacactggctatggtgcccgtactccggaggtgaaatgcgcaagttggaggcttgctgtggaagcacacaacatctttggctttgagaccattcctgaagagtgcgttgaagcaacaaaggaatacatccatggcgaacaatatagatcagactccaaaacagttaaccaacaagcttacttttatgccagagancctgaagtccatcccaaggacacatttgtgttcagtatagatggcaccgtactctctaatattccatactacaaaaaacatggatatgtggggtgagaaattaactcgaccttgtatgat

SEQ ID NO: 49453 - DNA, 223 bp, Glycine max
  Clone ID: LIB3167-023-P4-K4-B2
gtatcatgcttgcttattgggaataattttgttgaaccctgatgttggtagtagtatctagaaagtagcatagcgtttttgtttgcagaataagatatagcatctctgaacagtttgattattgcaccatgttttgcaatcagtgcatgtcgactaagtttctcaagattgtggggatgcttattcttgttccagttcttgaatccaagttgttatcatattc

SEQ ID NO: 49454 - DNA, 351 bp, Glycine max
  Clone ID: LIB3167-023-P4-K4-B3
cttttctcatagatagccaccttatactcctcggcttcctcgataattttcagtctcattgcttgctctctattccgttcatagcgtggcgcggaacagacaaaaagaaactaccaatttctttagataggcatggctttcaccttctacgccttcaccgtctacagacaaccacttaggcgtccccgtcgtcgccgacaccgtttctggctaccccgacttctcctccttcccctccgacgacgtccgctttaattacgccaacaccacggcgtcgcccgagatacttcggatgcagcgataccgggccagcttatttccagtcacccttcgagctagtacaccgagaat

SEQ ID NO: 49455 - DNA, 481 bp, Glycine max
  Clone ID: LIB3167-023-P4-K4-B4
cccacgcgtccggttcctgcaagcatgaagaacaccttatctggaatttatgcccggggattgattggagcttttcatgattggtgtgaaccattttcaagttaccctcggacatatgatcttctgcatgccaactacctcttttcccactacaaaagaaaaggggaaggttgtttattggaggacatcatgctggagatggatcgactaatacggccattgggatttattatcattagggacgaggaagatattacctctagaatcctagaggtagccccaaaattcctatgggaagtggaatcacaaatgttagagaacaaagagaagaaaatggaaactgttttaatttgtagaaaaaagttttgggctatcgtctaaagtgacttgacctaaaagctttctccaagaaattggttttagcatacgggtaatttgttatgtttaaggctattatgtaaacaataatttttttttttta

SEQ ID NO: 49456 - DNA, 376 bp, Glycine max
  unsure at all n locations
  Clone ID: LIB3167-023-P4-K4-B5
gatcaatgccttttatcaggagtgcatgaagttgggcaccactacattaaagctatgccagggcatgcagccaaagttgtccaagttttttgaaccttatgctacgactaacttgcatggagcttctgctgaattgagttctgactccagatctgaagcttgatgctctcggttctatcacggatagacccaagtttcattttttatggcagatagctagtaacattcttcccttttgtttttaaagaaggctgatcacttgngagtgaaagaagtgggtgggtnttgatcggaaccctgcattttgcaaatattgcaataagttacaggtgtctcaatcccgcctgcttaacagggattttttttttttttttgg

SEQ ID NO: 49457 - DNA, 368 bp, Glycine max
  Clone ID: LIB3167-023-P4-K4-B6
cgaagagggtaaagaagagagagaaaacaacgatagctcggaactttcttccaccccagaaaccttcgcagcttcagaaaaagaaaacgacggagcagaggcagaaacagaaccagtaacggtggaaacttcagaagggtcaacggaggaggaagaagagaaagtgatcgaaccgaatgaacaacctcagcaaccaggcccgacccgagaaccaatctcggatccggagtcaatggagcgagaaaacgggtcaaagcgcgaagagagagacagagaagcgttgccggagtgtttgttgctgatgatgtgcgagccgtagctgtcgatggaggtgtctaaggaaacgtgggtgtgctgcaccgacttca

SEQ ID NO: 49458 - DNA, 376 bp, Glycine max
  Clone ID: LIB3167-023-P4-K4-B7
gtttcagtttcggatctctctcttctttcacaccaatttccagcatttgaaacatggcagattcaaaatcaggattgaggaaaccagtgttcaccaaggttgatcagctttgcccggggaccagtggtcacactttaactgtgaaggtggtcaatgctaagatggtgatgcagagaggtcgctctgatggtcctcaatctcgtcaaatgcgaattgctgagtgcttggttggtgatgagactggaatgatcatatacaccgccagaaatgatcaagtggatacgatgacagagggagctactgtgatcctgcgtaacgccaaaattgacatgttcaaaggatcaatgaggcttgctgtggacatgtggggccgtgt

SEQ ID NO: 49459 - DNA, 447 bp, Glycine max
  Clone ID: LIB3167-023-P4-K4-B8
cccacgcgtccgcccacgcgtccgcccacgcgtccgggcttgttcaccaaagaaatagatgaggcactcttgaacagcgaaatcgacatcgctgtccattcgatgaaggatgttcctacttacttgcctgataaaacaattctgccatgtaaccttccgcgagaggatgtcagagatgcatttatatccttgactgcagcttccttagctgatcttccccctgcaagtgttattggtactgcttcgttaagacgaaagtcacagatcctccacagatatccatctcttaatgtgcaggaaaatttccgtggcaatgtccaaacaaggttaagaaaactcaatgagggggttgtccaagctacactattagcattagctggacttcaacgcttaaatatgacagaaaatgtgacttcaatcctatcaatagatgatatgctttcagct

SEQ ID NO: 49460 - DNA, 331 bp, Glycine max
  unsure at all n locations
  Clone ID: LIB3167-023-P4-K4-B9
ctgagtccgcgaaacgcgaaggcgtggtgcatgttgggggaaacctacgaagggaacaagatgggagaggaagcgaagaaagcttataaagaggctttggagttggagccacagttgaatgtggctcaagaagcgctcagcaggttgggatcgtcgtaatttggtgttgagtgatgtgagctttaagatgtgatcgatcgctttggttattgtatgtttaatttataactgttgtttctaatcttcgattatggagagtaattgaatgttaagtttgagcaagcaataaaatgattttcgccgnataaaaataaaatttataaaaatttat

SEQ ID NO: 49461 - DNA, 440 bp, Glycine max
  Clone ID: LIB3167-023-P4-K4-C1
cccacgcgtccggaaaaatttgagagaaaaggaaaggcttaacaacgcacaaaatgtcctctaatccagtaatactgcagagtgagaacttgaccaagtatatactggagaccagcgtttacccacgagaagaagagactctcaaagagctaaggaatgccactgcaagccatccttggggctttatgggtgctgctcccgatgcgggtcagctaatgaccttgctcttgaagctgttgaatgctaaaaagactattgaaagtggagtttttactggatactctcttctccttactgcacttaccattccagatgatggaaagattattgccctggatcctgacagagaagcttacgagataggactaccattcattaaaaaggctggtgtagagcacaagatcgacttcatagagtctccagctctaccggttcttgat

SEQ ID NO: 49462 - DNA, 267 bp, Glycine max
  Clone ID: LIB3167-023-P4-K4-C10
cccacgcgtccggccatgtgtcgcacatgggaagttctagcccgtaagaaaaatgaccttggagaactgccacttccaatggctatttatgttgtttctggagatgaagatggggagcgtggtggagcaccagttgcctgcattgaagatgccttcaaacgctggtctgcgttgtcaagtgggttaggtggttgtacacctttacttatattggttccgctggttttttgtagtggttgaatgtcaatcgcgcggttttatttctat

SEQ ID NO: 49463 - DNA, 368 bp, Glycine max
  Clone ID: LIB3167-023-P4-K4-C11
tgaaagggaaggaaagatgcagatattcgtgaaaaccctaaccgggaagacaatcacccttgaggtggagtcaagcgacaccattgacaatgtcaaagccaagattcaggacaaagaagggattcctccggatcagcagaggttgatcttcgcggggaaacagctggaggatggccgtaccctcgccgattacaacatccaaaaagagtcaacattgcatcttgttttgaggcttcgtggtggtattattgagccatctttgatggcactggcgaggaaatataaccaggataagatgatctgccgcaagtgctatgcccgtttacacccccgtgctgtgatctgtaagaataagaagtgtggtcaca

SEQ ID NO: 49464 - DNA, 411 bp, Glycine max
  Clone ID: LIB3167-023-P4-K4-C12
cttcgctagctgctcatcaatcctcttcctacatttctcagggggacttgaagcaatgatattaatggagagggacccaaacatgggcaaggaaaaagtgatttcaaattccacatttcttccctcatccacaaaagtgttcaaggacaagggcatctccaacaacagcatgccctcctggcttctcaccaacatttctgacttggaggagagaatgaaagtgttggcaatgagcacaacagaagaagaagaaatgggagacacttttgctgaaagagcagaaacttactaccaaaagaggcctcagctactgtcccttctgcaggacttgtacaatggctacataaccttatctgaccgttacatccaaacactggccaagcacaagcaccatagtagacactctttctc

SEQ ID NO: 49465 - DNA, 356 bp, Glycine max
  Clone ID: LIB3167-023-P4-K4-C2
tccaaccaaaaagggaaattttgcgggtatttgtgagtgtgtgagagagagagcgagcagtttcagacacagagagaggggtttgggattggagggattgacgctgcgtctcttcctcttctctttcgatccatccctcattcctaatcctccaatccaaccacctcagcctcacactcacatatacacatatctgaacgcgtatcgtccctcctatggcttcaaagcgcatcctcaaggagctcaaggacttgcagaaagacccaccaacttcttgcagcgctggtccagtagctgaggacatgttccattggcaagcaacaataatgggtcctgctgatagtccttatgctgga

SEQ ID NO: 49466 - DNA, 429 bp, Glycine max
  unsure at all n locations
  Clone ID: LIB3167-023-P4-K4-C3
gagattctggcaacatctgaggatagagatggaaagactttcgtttccacagcacgtggtaggaaatatcccgtgactgtcaacctatggcaaccagagaaaaatgcttttgaatgggctacatctttgaaagcccctcacacagaggatgcaattcgggttactcagtccacagcaaactttttcataagtgaagctaggaaatccacaaacacacctgatgctcaaaaagtgcgagataatctcatctacaattacaaacctacttttggtggaacggctgggaaaggatatgatcaagtgtatctctttgaataattctatctgtaggaggtgtccttgaatttgattttatgcacaataaattatgaactgnggatgtagtttgaagaaataaaaatttgtgcacagtgatgtttgtaagatgct

SEQ ID NO: 49467 - DNA, 353 bp, Glycine max
  Clone ID: LIB3167-023-P4-K4-C4
cccacgcgtccgcatggatggagcgttgctactcatagctgctaatgaaagctgcccacaaccacaaacatctgagcatttagctgctgtagaaatcatgcgtctacagcacataataatccttcagaacaaggtagacttgattcaagaaaatgtcgcaatcaatcagcatgaggcaatttcaaagtttatacaaggaactgttgctgatggtgcaccagtagtacctatttcagcacagttgaagtataatattgatgttgtgtgcgaatatattgtgaagaagatcccaatccctgaaaggaactttgtttttccacctaacatgatttgtttttcgggcatttgaggtc

SEQ ID NO: 49468 - DNA, 315 bp, Glycine max
  Clone ID: LIB3167-023-P4-K4-C5
ccaacgcgtccgcccacgcgtccgcccacgcgtccgaagagctgtggcgacatcttgaggtcacttttaaggtcaatcctcaattctatgcatttaggtggattactctcctgctgactcaggaattcaattttgctgacagccttcacttttgggacactcttttaagcgatccaaatggccctcaggagactcttcttcggtatgctgtgcaatgctggttctcgttcgtaagcgccttctttgcggtgaattcacttctaatctcaagttgctgcaaaattattccaccacaaacattaatcatttgctcta

SEQ ID NO: 49469 - DNA, 167 bp, Glycine max
  Clone ID: LIB3167-023-P4-K4-C6
cttagatcggaggaagagaaacctgcatattccaaagtctgaagtatgtcaagtcgtactagagatattagtgccggctgtcaaaaaacagggtatcccactgaaaagagtcctgcgaatggaactacttatgacaagagttgccgctaatgcactcatggagggtg

SEQ ID NO: 49470 - DNA, 332 bp, Glycine max
  Clone ID: LIB3167-023-P4-K4-C7
taggtgttcagtttaatgctgttgagtttaaaaggtccactgaagaattgaaattgcgttattctaattctaacgaggaagcagttaataaaaccgcaaaaaagaagcggaaatcagaaccctatggcgaggaaccttctggtgaaaatgaagaggaggcagaaatgcgctataggttttatgaaagtgcatctgcaaggaaacgaaccgtgacggcagaagaaagagaaagggcaattaatgcatcaaaaacatttgaaccgactaatcctttctgccgagttgtcctgcgaccctcctatttgtataggggatgcataatgtatttgcct

SEQ ID NO: 49471 - DNA, 444 bp, Glycine max
  Clone ID: LIB3167-023-P4-K4-C9
ggagactagttctgtattcagattacattgcaaaaatggcatcattcaccatgacagcttctatctttggctgcccagctgtcaccaaacggtcggcagtggctgcgcagaggagattactcgtagtgagtgctgccaaagctgaaggggaaaaggtcagttatgacaacaatgatagcaatggaaggaggaacttgatgttcgctgtggctgctgctgctgttttctctgttgctgggatggcagtggcagatgagcctaaaccaggaacctcagaagccaagaaaaagtatgccccggtttgtgtcaccaatcctacagctagcatttgtcgcaattgaggatctcctgtttcattttacctctgatgatcggaaatgtacgttggggatgtagtaatggttttgatttaatatgatcctcattgtactagatgttcattaa

SEQ ID NO: 49472 - DNA, 463 bp, Glycine max
  Clone ID: LIB3167-023-P4-K4-D1
cttgttgatggggacaagatactatccctgtttgccttatttattagggagcaactaagctttcttaatgagaaagaagacatgaaaaattgccaccaagcccatcttggtgtcgtacagactgcttatgcaaatggggcatctactaattaccttaaactgttgggacttgaagtcaattttactccaactggagtgaaatatctgcatgaaaaagccaccgaatttgatattggtatctactttgaggcaaatggccatggaactgtcttattttcagaatctttcatagagtcgttggaggctagaactaatgagatttctttaggatccaaagtttcaggttcagaaggggaaaaagctgctctgagattattggctgtcagtaagttgatcaatcaagcttgtggagatgctttgagtggattgctcttggtggaagtcatattacagcatatgggat

SEQ ID NO: 49473 - DNA, 416 bp, Glycine max
  Clone ID: LIB3167-023-P4-K4-D10
catattctggcgagaaaatataaacaactttgaagaaaatgatttccagatcctaagggtcctaataacaattttggacacgtccaatgatccaaggactctggctgttgcttgctatgacctttcacagtttatccagtgccattctgctggacggatcattgtgtcagaccttaaggcaaaagaacgagtgatgaaactaatgaatcatgaaaatgctgaagttactaaaaatgcactgctctgcatccagcggcttttcttaggtgcaaagtatgcaagcttcttgcaggtttaattctgtttctgtggggtggcctagtgtatgcactagattccatcaacttctctgctatctcacaaattggatcggctctcgtgtacaagtcttattcattgttttaatgattaattta

SEQ ID NO: 49474 - DNA, 217 bp, Glycine max
  unsure at all n locations
  Clone ID: LIB3167-023-P4-K4-D11
ccctcgcgtccgccctcgcgtccgggtatttaaaatttttataaaaaaaataaaatattaaaaattttaaaaatataaataaaaaaaattgggaaagaaagttatttttgtttataagatttttttttgtgttggttgaattgttttttttttttttttttgtggnnagttttttttttttttggnagtttttttataatgttttgggttggttttt

SEQ ID NO: 49475 - DNA, 445 bp, Glycine max
  Clone ID: LIB3167-023-P4-K4-D12
agattctctaaaccctgatcaagttaaggccttggaggctgttctgccaccaaagccttcttcacaattgacagacatggagctggatgaatgtgaggaaactacactccatgatgtcaacatggaggaggagactaggaggaagcagcaacaagctcaggaggcatatgatgaggatgatgacatgcctggtggtgcacagagggtacagtgcgcccagcagtaatgactttgtgtggaagctagattcagaattgatgaaaatgatgatatgatgataatactggtgatgttccataactgtagtgtgtggcttaaagataagtagtgtttgatgaaatgattgtgagaaagtgaacagtgtatcacttgcgtttttattattgtcgaaggggtaacttccgttctgacatcctaaataccttactatattttggtggttctt

SEQ ID NO: 49476 - DNA, 339 bp, Glycine max
  Clone ID: LIB3167-023-P4-K4-D2
cccacgcgtccggaaaaattaaaactcacaaagcaatgattgaaattaacaagctactgaactttgcattgcccccattatcactaattgtcatcttcatcttcacgccacctttgctcttagtgaagctgcttatgtgtgttaaaaagtttctatacaccgaaaacgtggcagggaaagtagtattaatcactggagcagcctcagggattggcgagcaagtagcatatgaatatgctaggcgcggagcaaagctgtctctgtttgacattagaaaggacaaacttgtagcagtggctgataaggcacgatctttgggtagccctgatgttaccatca

SEQ ID NO: 49477 - DNA, 342 bp, Glycine max
  Clone ID: LIB3167-023-P4-K4-D3
cccacgcgtccgcccacgcgtccggttttcttcagaaatttgccatcgttgagagaagcgtgagagccttagtcgttcaagatgagagctaagtggaagaagaagcgcatgaggaggttgaagaggaagcgccgaaagatgagacaaagatctaagtaggtgcttgagcaggagttgagatgagctttccatctgctaccagcctcatgacattttaggctgttatggctcttatgatcttgaggtctagtcgctaggggagcttcactcttgacttagtttgctttactggtcctggtcctgggccaagactattgagtgggggttaagttgggatgttta

SEQ ID NO: 49478 - DNA, 248 bp, Glycine max
  Clone ID: LIB3167-023-P4-K4-D5
cccacgcgtccgcccacgcgtccgcccacgcgttcgtccacgcgttcgtccacgcgttcgcccacgcgttcgtccacgcgttcgtccacgcgtgcggaaacacgaaactcagaatccatggcgacaccagcgacgacgaagcgaaaaccggtgttcgtgaaggtggatcagttaaaacctggcaccaacggccacacactgacggtgaaggtggtcagtttcaagccggtgaagacggtgagcacccg

SEQ ID NO: 49479 - DNA, 364 bp, Glycine max
  Clone ID: LIB3167-023-P4-K4-D6
cccacgcgtccgcaaagcgagagcattccattgttgttatattgtattgtagccggagaagaagagaagagatagcggcgaagaaagaaagatgacggaggcatatataaggaagaagcccgggatggcgagcgtgaaggacatgccggttctccaggacggtccaccaccaggcgggttcgctccggtccggttcgcccggcgcatccccaacaagggccccagcgccgttgccatcttcctcactgctttcggcgctttctcttggggcatgtaccaggtcggccagggcaacaagatccgaaaggcactgaagggagaaaagtatgctgtccgccgatccatactggctgtgcttcaggct

SEQ ID NO: 49480 - DNA, 261 bp, Glycine max
  Clone ID: LIB3167-023-P4-K4-D7
cccacgcgtccgcccacgcgtccgcccacgcgtccttccacgcgtccgacccagccgcagcagcaagtgatcgaagcgaaaagagagtaatcagcagagaaattcatcgtcgtagttatgggtaaagttcacggatcacttgcacgtgccggtatggttagaggtctaaccccaaaagtgtcctagctggatttgatgaataagccacgtggccgcgctcacatgatgatgcatttttatcgccgattttttttcgtcgtt

SEQ ID NO: 49481 - DNA, 460 bp, Glycine max
  Clone ID: LIB3167-023-P4-K4-D8
ccgtttcgtaactttcggttcctcccattttccggttcaataaattaaattaaaaaaaccgaaccggcggatctcggtggtttcatggaggctcatggcggagggctccgtcgcatccttgtgctcgccttctgcgtcgccggaatctggtccgcgtacatctaccaaggcgttcttcaggaaaatgtgtcgacgaagcgattcaacggtgaaaggttcgagcaccttgcgtttctgaacttggcgcagaatgttgtgtgtttaatctggtcgtttatcatgataaagatgtgggctagtggaaattctggtggtgctccttggtggagttattggagcgctggaattaccaacaccattggtcctgctatgggaattgtagctttgaagtatattagttaccctgctctggtgctggcatagttcttcaaaatgattccagttttgctgatgggtactc

SEQ ID NO: 49482 - DNA, 250 bp, Glycine max
  Clone ID: LIB3167-023-P4-K4-E1
gtttggcacgtgccatttaatctgtgcttgtttttctgttgagcaagcttcaaatgttcgttcaacgaaaagtaacacgtactcttaggcactcttaggaaacgaacatttcgttcgtactagcttggtcattattattgtggtgatggttaaagcatggaaggctccttggtcttccctgtcagcctcactagtcctttgtaatctaagtgaaatttctactaattaataaaagttctatatttaagct

SEQ ID NO: 49483 - DNA, 425 bp, Glycine max
  unsure at all n locations
  Clone ID: LIB3167-023-P4-K4-E11
gggactcccattccgactcttagccgccgatctctcagggcttgcatcttctcaggtaagctgtgaagatgtacacatcaaggaagaaaatccacaaggataaggatgctgaaccaactgaatttgaagagtcagttggacaggcattgtttgatctggaaaataccaatcaggagcttaaaagtgatctgaaggatttatacataaactcagccgtgcaagttgatgtttctggaaaccgcaaggctgttgttattcatgtcccttacagattaaggaaaggtttccgtaagattcatgttaggcttgtcagggagcttgtagagaagtttagtggcaaggatgtaatcttggttgccatcccggaggattttgaggccaccgaagaagggttctgctgctcagcgtnctcgcagccgcactct

SEQ ID NO: 49484 - DNA, 464 bp, Glycine max
  Clone ID: LIB3167-023-P4-K4-E12
gcccacgcgtcgaagaatggctcaagcaatggcatcaatggctggcttgcgtggttgctctaggctggttggaaggagccttaggtgagtggctccacacgcttgaatgtggggagtggagcagggggcctcagcacacgtgcagggtccagtttgtgccaacacaacaagtgagtggtgaggtcaaagcagccgttaggcagtgctttttcttgttactggtggcttggtcactttttcttttatgatttattctgtacgcatgtatattttacgatttttttatttatctataatttatttttttttatgtaatgattttttctacacatttatttttcttcatctatattttttttttaattatattttttttttgtatactttttttttactttattattttttgtctcacatcatttttttgtcgtatattttatattttttgacatgtttattttttt

SEQ ID NO: 49485 - DNA, 488 bp, Glycine max
  Clone ID: LIB3167-023-P4-K4-E2
cccacgcgtccgggggaacttgtcctcgggttttgaacgtgaaccagaggctgatatctttccttctcatgagtggcatagagaaagcagcgagcctatgtatcaagttgttcctcctgacccattaatgagaacttatacagaagaaattccatttaaacattctacttctgctgttggggaaactcaaacctacggtgacaatggaggaaaaccatccatttctcttaaatctgaaaccctatcaactactcccaaagctgcagcatgtgagttaacaagccaagaaagagattctgcattattacggtacaagcagaagaagaaaactaggagatttgacaaacacataaggtatgaatcacgaaaagttcgggcagaaagcagggtaagagtcaagggtcgatttgccaagatggaacatgaacattgaaatcatggtaggctgctatgacatcataactataaattccagctcaaatcacatg

SEQ ID NO: 49486 - DNA, 433 bp, Glycine max
  Clone ID: LIB3167-023-P4-K4-E3
cccacgcgtccgcccacgcgtgcgcccacgcgttcgaaataagagcagaggcggaggtagtgactgtgctatctgcgacctaggattacgagcccacctatgtatcacgctgctctgcttgacccattaatgataactgatgctgcaacaccaaaatcacttcattctaaccttgcttcaacagaatctcagagctacggagacaatgtatgataaacatccatgcttcttaagaggaaacacctataaactactcccaaagcgggagcacgggagtgaacaagccaagaaagagattctgcattatttccgtacaagcagatatatgaaaactaggagatttgactaacacataatgtttgaatcacgaatagttcggtcagaaagcatggtaagagtcaagggtcgtattgccaagatggaacatgaacat

SEQ ID NO: 49487 - DNA, 468 bp, Glycine max
  Clone ID: LIB3167-023-P4-K4-E4
cccacgcgtccgcccacgcgtccgcccacgcgtccgtgaaaactttggacaaaaaatggagcgctacacaaggccaaacaggagtgacatccacctctcagcagaggaagaagccaccatagaggcaaagaccagagagtactttgatggggtcgcaccacaacgccacacaaagcctcaacgaagtgactattcagctcaatatgtcgatgctttctccaatgcccatcactcttctttaactataccagaattaacacaattccaactcctccagaacgatccccaagagaagaaattggtgtacaatggaagtcaagtaccggaagaatttgtggaaacagagtattaccaagatctcaacagcgtggacaaacaccaccatacgactggaacaggatttatcaaagtagagaaaaatggaaatgactttcacatagaaccagataatgacactggttccatcac

SEQ ID NO: 49488 - DNA, 118 bp, Glycine max
  Clone ID: LIB3167-023-P4-K4-E5
gtccgaaaagcacaaagcaaagctaatccttgagttaaaaattggcagcagcttcttccatggctctctaatcccaatccttggctggcaaggccgtaaacctgtccccttcagcccc

SEQ ID NO: 49489 - DNA, 291 bp, Glycine max
  unsure at all n locations
  Clone ID: LIB3167-023-P4-K4-E6
tcccggtcgaccacgcggtccgcccacgcgtccggtcggcatatcaaacatgatcttgaagattcaaaggaatgaatacatgggatttgataatttttgcaggaatgatacatagagcttttcaagtatctttttatttgcacacattttctgtttgttgtttgccaccaccaaaccacctgagaggggatgatatgtttagtttttatttcanatgtcaaacagaaagtttgcgctaattgaagcattttttggatacatatgctaatagaagcattaaatcttgtatgt

SEQ ID NO: 49490 - DNA, 397 bp, Glycine max
  Clone ID: LIB3167-023-P4-K4-E7
ctaagcattccaaaaatgaatagcagctgtcctgttggtttgaattttgttcatatggttgagtgctgcgctgtggaagtcttggtctgtgcctctttctttcattacctttcctcctatatatctcttttttcttcttctcttttttttttcttcattccctctttcttttaccttctttctcttcacttttttttttccttattctttctcttctctttctatattttcttccttctttcctccctcatcatttattctcatatttttcttcctcccctcttttttccacttttactctctcttcacctctctttttcctttctctcttttctttcttcctttttttttctctttccttttttcttccttttcctcattttcttctctatttttt

SEQ ID NO: 49491 - DNA, 419 bp, Glycine max
  Clone ID: LIB3167-023-P4-K4-E8
gaagtggaagccaaaagaaacagaataaagggtaagcaaatgaaaccaccgctaccacttttttcattgctccggcatttcctcctcctatcaccaccaccatttgaagcaaaagagaggctatgctgaaaagggtctgtgtggaaacctttgacatgatgatgacaagtgttgttgtgtcccatgaaagtggtaagtaagtgggacttggaacaaacaatggctaagcataagaaagaaaagaaagtaagacacaaacaggttccacttgcacactctcttttttggtttctcacttctcaaactcagatactcagatgatagcggtatgtatagtacaatgaagaacaaagggtaggatctaattaacacaagatggaaagtagtgagtgaattgagatggacatgtgactgaagaa

SEQ ID NO: 49492 - DNA, 393 bp, Glycine max
  Clone ID: LIB3167-023-P4-K4-E9
ctggaattgaaggaaaaatcaatgcaaggaacagtgatccaagtctgagaaaccggactgggccagttcagctgccatacactttgctccatcgttcaagtgaggaagggttgactttcaaaggaattcccaacagtatctctatctaattaaaaagagtttgtggtttccttatctatgttgtacttctgaataacatagactttatgcatgtctatgcgtaattattgcctgaacttttgcactattgtatttggatgctctcaggttttatataatatagtgtgttttcatttttactttgtatttattttcatctgttggttttttactatctattttttttactttcttcgttttcttttttgtgttattttattttatatttctgtt

SEQ ID NO: 49493 - DNA, 479 bp, Glycine max
  Clone ID: LIB3167-023-P4-K4-F10
atatagatagatatctatttgaattgcttcattcgcgaggagccgtatgaggtgaaaatctcatgtacggttctgtaataaagatggaattgagaaacaaccatcaattataacccccaaagaaccagatttcgtaaacaacatagaggaagaatgaaaggaatatcctatcgagggaatcatatttgcttcggaagatatgctcttcaagcacttgagccagcttggataacatctagacaaatagaagcgggacggcgggcaatgtcacgaaatgttcgccgaggtggacaaatatgggtacgcatatttccagacaaaccggttacagtaagacctactgaaacacgtatgggttcaggaaaaggttctcccgaatattgagtagctgtcgttaaacctgggaaaatactttatgaaatgggagggtaccagaaaatatagcaagaaaggctatgtcaatagcatcatccaaaatg

SEQ ID NO: 49494 - DNA, 485 bp, Glycine max
  Clone ID: LIB3167-023-P4-K4-F11
ggtttgtcttgtttgagattggagagaaaattgaattgcgtgagtgaaagttacatcaaccccttacgcgcaaaccaattccaattccctttgcaagcaagcaatctcagatagctgattcacacaatccctttctctgctgctaattggaatcggcatggtccaaccggcgccggcgatgactcagttcctcaactccgtcctctcccagcgcggcccctccgccgtcccctactccgaggacaccaagtggctgatccgccagcacctcgtggccctcaccaccgccttcccttccctcgagcccaaaacggcgtcgttcactcacaacgacggccgttccgtcaacctcctccaggccgacggcaccatccccatgacgttccaaggcgtcacctacaacatccccgtcgtcatctggctcatggagtcctaccctcgccacccgccctgcgtctacgtcaatcccacgcgcgacatgatca

SEQ ID NO: 49495 - DNA, 456 bp, Glycine max
  Clone ID: LIB3167-023-P4-K4-F12
gatccccatcacaacgcatcatggttagcaccaagcctaaccagcttgtttgcaaggcacagaagcaagaggatattgatgtcagcccaatctctcgccggttagctctaaccgtgctcattggtgctgctgctgttggctccaaagtccaacctgctgatgcagcttatggggaagctgccaatgtgtttggaaagccaaagacagacacagatttcctgccatacaatggagatggattcaaactatcgattccctcaaagtggaacccaagcaaagaggttgagtacacaggtcaggttgttagatatgaggataactttgattcaaccaccaacgtggttgtcaccatcactccgactgataagaagtctatcactgactatggttcacccgaagagttcctctctaaggtgaattatttactaggaaaacaggccttcttcggcgaaacac

SEQ ID NO: 49496 - DNA, 441 bp, Glycine max
  Clone ID: LIB3167-023-P4-K4-F3
cccacgcgtccgccccaactgaacatctatttttgtaaatggatctgcggtatatctgatgtaagttttatttcttattcaactctaatcttacctaaccaaaatttaaatcttgtgctataatgcaggtcacaacaattgattgaaaattttgagtccctagataaataaggcatctaaatctcaattttggccagtggagagtgatgaataaggacatctaagcgtgtctttttcctttaacatgctcttaaattccaccccactcgatttcaatgagatttgaaacctccataattgaccatgcaacctggtctgattgaatcatacatactgtaacattatgctactccaatgtgtacgtttagaatgatctgttgtgataaacctttaagtccttgtacaagttttctttcatgcaatcttcctcttagtttggtt

SEQ ID NO: 49497 - DNA, 468 bp, Glycine max
  unsure at all n locations
  Clone ID: LIB3167-023-P4-K4-F4
ggaaaaggcacagtctggggaaaagctccttcaaagatagaggccacatatactactacttctggggaaactaaaagaagccttcttttaacctctggatggtggggattatctcgtcactttcattatgtccctgaaatactggcagctttcttctggacagtcccagctcttttcgaacattttttgccttacttctacgtgatatttcttaccatccttctctttgatcgagcaaaacgagatgatgatcgttgcagatccaagtatggcaagtactggaaactatattgcgacaaggtaccttacagaatcattccaggaatatactgaagaatgattatcgaaaacggcttatctggagtcccccaacttaaaattaataaccaaggacgccatctgtagctttatatttgttggtgcctncttaagacacggggtagattagactttcgctgagagcttatt

SEQ ID NO: 49498 - DNA, 434 bp, Glycine max
  Clone ID: LIB3167-023-P4-K4-F5
gaaaaaatggcaacaaatattctctcaacctcaaaccccttcctactaactaattcattctcatcatcatcatttgtaacaccaacatatgtttactacaatcccataatgaaatgcacagtgaagagggaattaactctttgcaaagcagcaaaccaaccagcccctccacactctccaattgttgtgacaaagagaggcttgtccatcagcttcatcaccagcttcgtgctttcattggctagtaagaagaatgcaaatgcagcaatacttgaggctgatgatgatgaagaactcttggagaaagtaaagcgtgacagaaagaagagacttgagaagcaaggtgtgatcagttcttccaaacaagaaacagggtatcttcaagatctggtgtacaagctaagcacggttggtcaagcacctgaaaagaatga

SEQ ID NO: 49499 - DNA, 436 bp, Glycine max
  Clone ID: LIB3167-023-P4-K4-F6
atcgatcggagctacttagagtgaatcatgattggacctatgagtcactctctccatggtccccactttactagtattatgaaccgaattgcctcatcactagcacttctacatcaccatggctgaaactccatcaccctctgagtctcccacagtctactttggccccatcataagtaatggccaagttggagacttcgactaggattgccttgtggcagcaattgtatgtgcctttgtgtgtgctcttggcctcaacacaacggtacaatgtgtgtttcaatgtgcttgtcgtgtcctcacagagcctcgccaatggattgcttcacgaaggctcaactctggcctcaagaaaaaggaaatgaggggcttgccaacctcaacttacactactacacactctgctgctggctcttcttcttcttcacctaattct

SEQ ID NO: 49500 - DNA, 301 bp, Glycine max
  Clone ID: LIB3167-023-P4-K4-F7
cccacgcgtccgcgaaataatggcgactacgaatccctttgatttgttgggcgacgacgccgaggacccctcacagttgatcgcggcggagcaactgaaggccgcggcagccgcggccaccgcgccacccaagaaggaccaggccaagcccggagctcgcagcggcgcgccggcccagttgccgtcgaagccgcttcctccctctcaggctgtaagggaggctaaaaatgaaacttcttacggcggtcgtggtggtggccgaggaggtggaagaggatttggtctctgtctgtgtggttgc

SEQ ID NO: 49501 - DNA, 494 bp, Glycine max
  Clone ID: LIB3167-023-P4-K4-F8
cccacgcgtccggttcctccgctcaacaactataataacatctttctctctccgaacagatcacactatggccacctcaagcgccaaatcagtccatgatttcaccgttaaagatgccaagggaaatgatattaatcttggtgactacaaaggaaaggtccttatcattgtcaatgttgcctcacaatgtggcttgactaattcaaattacactgagctcagtcagttgtatgagaaatacaaacagaaaggtctggaaattctggcatttccatgcaatcagtttggggcacaggagcctggatctaatgaacagatacaagagtttgtttgtactcgcttcaaggctgagtttcccgtttttgacaaggttgatgtgaatggtgacaaagctgctccactgtacaagtatctaaaatcaagcaaaggtggactctttggggatggtatcaaatggaacttctccaagttccttgttgataaagagggaaatg

SEQ ID NO: 49502 - DNA, 420 bp, Glycine max
  Clone ID: LIB3167-023-P4-K4-F9
gtggtttcagtgagtgatcggtgttcacttgatccttcataagtcgtcatcatcatcatcatcatcaccgttgattgaagaagatgccgatcagaaacatcgccatcggaaggcctgaagaggctactcaccccgacacgttgaaggcggggttggctgagttcatctccaccttgatcttcgtgttcgccggttcaggttccggcatcgcctacaacaagctcaccgacaacggcgccgccactcccgccggcctcatctccgcttccatcgcccatgctttcgccctcttcgtcgccgtctccgtcggcgccaacatctccggcggccacgtcaaccccgccgtcaccttcggcgccttcgtgggcggcaacatcaccttacttccgcggcatcgtctacgtcatcgcccagctcctc

SEQ ID NO: 49503 - DNA, 485 bp, Glycine max
  unsure at all n locations
  Clone ID: LIB3167-023-P4-K4-G1
acccaattcttcttccctttttcaattccttcactctaaccttnccttgcatcaaactggaaccctcactgtcgcacgtgccttctccaacccccacacgcttcagtctctctgtttccgcggcggaaaccaccgcttttgccgcccctcccactccccaacctgagaagcttggagttgtagttaagccaacggagaagccgagacttgtgttgaagttcatatggatggagaagaacattggaattgcgcttgaccagatggtaccgggccatggcaccattcctctgagcccatattacttttggccccgaaaagatgcctgggaagagctcaaggagttgcttgagaacaagccttggatctctcagaagcagatgattattcttctcaatcaggccactgatatcatcaatttgtggcaacagagtggtggcaacttatcctgaactcattcatgtgccaacatatttcaatgatgtttt

SEQ ID NO: 49504 - DNA, 293 bp, Glycine max
  Clone ID: LIB3167-023-P4-K4-G10
aaccagactcaaacagaaggacacgtttcacaggtttttgttggagctgaaaccaatcggcttttaaagctcattcctagatacctgattgcctctgcatagctaaatatgtaaagtctgtacttttcccacttgcacctcatagacaggtgtttcatagacggatactctaaaatcagacctgagccctgcgtcatggaccagcaagcgtgccttccatccgcacagtagccttttcaacatccacaacgagcctacatcatcattccgactcatcatgactccactaaaat

SEQ ID NO: 49505 - DNA, 475 bp, Glycine max
  Clone ID: LIB3167-023-P4-K4-G11
cccacgcgtccggtccaagcagcctccaattcgtgccactctcttcaaaatggccgttaccttctcaaatctccacacagaatcaggtctcaagtccctcgacgacttcctctctgggaaggtctacgtttctggggatcagttcacaaaggacgacatcaaagtgtatggtgctgttttggagaagccaggtgactcttttcccaatgctgccaagtggtacgaggttgtctcatctcagcttgctgcaagcttccccggcaatgctcaaggggtgagattcagtggcaaagcttctgctccagcggaggctgctcctgcgaaaccggatgcttctgctgctgaagatgatgatgaccttgatctctttggcgatgagactgaggaagacatataggcagcagaggaaagggaggctgctaagaagtctaccaagaagaaagagagtggcaaatcttctgttctgcttgacgtt

SEQ ID NO: 49506 - DNA, 190 bp, Glycine max
  Clone ID: LIB3167-023-P4-K4-G12
tgtatcacttgtttcatctgtaaagaagaaattgtaaataaatgagaaatgaaaaggtcaaaacctgagtccggtgtgttcgcaggttgtaaaatgcatcgtgtatcagtgcctaataatatatccaaattctgacaatttttgtaaagaatatatattttgttggcttaaatatatttttggttctagt

SEQ ID NO: 49507 - DNA, 401 bp, Glycine max
  Clone ID: LIB3167-023-P4-K4-G2
cccacgcgtccgcttgcactaattaggctactctcaatttcttctccttcactctcagagaactcatatggccgccacactcactcttctaaagcttccaatccttcctaacaagccattactgccacgcccatcaacctcaaaactttttccacttccttccatctattcaaaattaaatatcccaaaagataatattgtttctcctaacaacatcgatgctctcaagcctgcctttctttccctctcggcaatcacatttccattgttattagaaaccaaggatgcacttgctgttggtggagagtttgggatattggaaggaagatcatttgctctcatacaccccattgtgatgaggttctttttcttgtatacattgtgggcagggtatttggggt

SEQ ID NO: 49508 - DNA, 463 bp, Glycine max
  Clone ID: LIB3167-023-P4-K4-G3
cccacgcgtccgattccacataataatattacgcctcccctcatgtgtatatataatatatatagttcagttgagtgggtgtgtgagtgaaagaccacaaacaacaaggttggttcaacttgtgtgaagggattggaacatggaaaatcttggtggttctagtcgtaggaaagcaattgaggagcttcttagagggcgtgattctgcccaacaacttaagagtgtcatcaatgggacttatgatgatggatcagccaccccatttgctcaacaacttgagaaagatgtgctcatgtccttcacaaactcccttttgttcttgcacaacaaccccacttctgaatcacatcatgtcttcaatgttcaagtatgggactctcccaagtctgaggactctcaagagagcaattgcaaaagctccaccattaatgaaccaagagggtgctacaagagaagaagaact

SEQ ID NO: 49509 - DNA, 438 bp, Glycine max
  Clone ID: LIB3167-023-P4-K4-G4
ctactaccctttcccttctctggcgtatggttgcagctactgttatgcttatgcgactactaaattaaaacctactcactcactctctctaacactctccaaccaccgtcgcatttctgcgtcacaacctcactcttccaccttctccatcatcaccaacctcttcttcttccaaaaccctaatttcatcacggggaacactctcttcctcaggatgcagagattttgctcagtaagtggcttaagtaagaacaaagcactggtggagaggttgcagcgctatggagtgatcacatcaagtaaggtggctgaagtgatggagacagttgatagagccttggttgtaccagatggagctgcaccttatgatgacagccccatggccatagggtacaatgccactatctctgcgccgcatatgcatgccatgtgtcttca

SEQ ID NO: 49510 - DNA, 233 bp, Glycine max
  Clone ID: LIB3167-023-P4-K4-G5
gcgtccgctttttacttcccctatggctcgtcactccttagctcttagccctcctcctcttcgccgccgtagtcaccgccgagatggtgagtgtcgcgaacagatgcccactacattctgaattcgtatgtgagacccgaagtcgtccactttatacatgatgaccaccctgtgtttgttccacaacccttatttgagcacagggatcactctctctctaagtatgcagagat

SEQ ID NO: 49511 - DNA, 338 bp, Glycine max
  Clone ID: LIB3167-023-P4-K4-G6
ccagcagtaccagtctcggacttacccgttcgatcattactctctctttgcagagaagagagaaatgtcggtgagttccagctccaggggaagaataacgacggagcttcaagtccccaagaaatggacagagagagaaacaagtcctgagagaaccaaagtttgggccgagcccaagcccaagcccaaaacgcccagaaaagtttccgtcgtttactacctctcccgaaacggccaactcgagcaccctcacttcatggaggttcctctctcttcgcctcacggactctacctcatagacgttatcaaccgcttgaacgctcttcgaaggaagggca

SEQ ID NO: 49512 - DNA, 308 bp, Glycine max
  Clone ID: LIB3167-023-P4-K4-G7
catacgcgtacgtgcaagagaggatatggaatgggaatactcataggcggcagccgaactacataaatcactcacacaggtgatgtgctcaaacgacccggtggggcctcatgctgtaccgatctcgattgctatcataacttgttcaggagaggcagcactggcctaggcggcgtgagtgaggtgctccatggaggaaaagcactcaagcagggcaaacctagggatgggggcatccttgttagcagatcgagctgacgcaacatgtcaagcccagcagccatggcttggtgtgatgagagactcag

SEQ ID NO: 49513 - DNA, 465 bp, Glycine max
  Clone ID: LIB3167-023-P4-K4-G8
gtcgacctcttccattaacgggtggtgcctctcttccatctccccagccaaaacctctctcaagatggccacattaggcccttctgtcttcgcaaccgttagcactccttcttctccttcttcttcttcttcttcttccttcccttctctcattcaagacaggcctgtctttgctgcccctgcccccatcatcaccccaactgtgagagaggatatggcaaaggaattctagcaagctattgaagaactccagaaattgctgagggagaagagtgaactcattgccacagctgcttgtatagtggagcttatttcaccttattttttaacatcatcattttatggcatctcttttttgaagccttattctggttccaagctgttttatctactctatttttgtcacatatgttttgtttcctgcttattttgtttctcttgcttttttccatgacaatttttttt

SEQ ID NO: 49514 - DNA, 485 bp, Glycine max
  Clone ID: LIB3167-023-P4-K4-G9
ggcaagagacagaaagaaggacacggttcgaggttagggtttgagtctcaaccactctttctttaaagcacagtctcacatacctcattgcctttgctttgttctctctctctctctctctctcttttctctgtgtgtgtgcgtggattggtgaatttgagattgaagaagatgatgcaggctggacccggcggcatggcccaacaagcgaaccagcaatacgcacagcaacagcaacaacaacaacaacaagcctacatgatgatgccgccgcagcctcagccccctcagatgtgggccccatcggcccagcctccgtcccaatcggtagctcctccgcaacccaccagcgccgatgaggtccgtaccctctggatcggcgatttgcagtactggatggacgaaaattatctctatacctgtttcgcacacaccggcgagctggcttcagttaaagtcattaggaacaaacaaactagtcaatc

SEQ ID NO: 49515 - DNA, 426 bp, Glycine max
  Clone ID: LIB3167-023-P4-K4-H1
ttcttttcctccttgctttccccttcaatagcaatggcctctgcaacagaagccattaataaattgttgttcatattcctctttcttcaacaatattccttattaataatggcggatgattcagtttcagttccagttccagctgattggccgcaacagttccactcggttctgttcataaaccgaagcggcgatctccagaaaacggacttgtggtacgactggcccaacggtcgcaacttcaacatcattcaacaccagttgggtgtgctcaaatacgacctcgaatgggacaatggaacctccttttactacaccctcgaacccttcgacaaaacctgcaaaatcgtccatttcgaggttggcattctccgccccaactggctccacggcgccaactacctcggtcaggagcatgtcgacaac

SEQ ID NO: 49516 - DNA, 446 bp, Glycine max
  Clone ID: LIB3167-023-P4-K4-H10
gcattctgtaatctgcagcaccgtcgtttcactttcaccatacgactcttgtcgccggaaccctaaccgattgcgcgccaaatcctctctgctcgttcagaaacaggacgcccaactctccgactccgactccgactccgtctccgtctcgcgccgcctcattctccttcgccatgctaagagttcctgggataatcgctctctccgcgaccatgaccggccactgagcaagtctgggaaagaggatgctgtgagagtttcccgcaggctccaacagttgggttggattcctgaacttatcttgtccagtgatgcagcgcggactaaggagacgcttaagataatgcaggagcaagtgcaggagctggtggaaagccgggttcattttggttctaagttctattcgattgcagctatggatgggcaaacggcagagcaccttcaaa

SEQ ID NO: 49517 - DNA, 463 bp, Glycine max
  Clone ID: LIB3167-023-P4-K4-H11
tccacgcgtccggaacaaccagctacccaggttactaccaccgtagaaccaaaggaagaaaccaccaaagaagcaaaagaggaagaagaagccccagttgagactaatgaggcaacagaagtgacagaggaagtgaagcctgaggtagaagagaacccagcacctgagagaacagaagaagaagaagtgaaagaggaaactaaagaaaccgaatcagcaccagtggtggaacagaagcaagaggagaacaaaccagctgaaaccgttgaggaaaccaaaacagaacaagtttctgttgagaagactgaagcttaagcccatggatacggtattattgaaggagaatgaagtttcctgcatttttattttatttattaataatggtattattggaatgggaagtctttgggtatggctttacgatatatatatatatatatatatatatatatatatatatata

SEQ ID NO: 49518 - DNA, 353 bp, Glycine max
  unsure at all n locations
  Clone ID: LIB3167-023-P4-K4-H12
cccacgcgtccgcttgttttgtcatctaagaaaacctagcgagagtaagcacacattgatcagcaacaatggcaggctactcaagccatgctttgaaaaccatccctttttcttcctttgtgaagcctgtcagtaccaaaccaacatcattcttcacaccttcacctaccaaacctttcttacccttcacctgaccaaaccactctctcaccaaaaatctcaagctgaactccactttgccacacttttgcttgtcttcagttcccaagaaatctttcacttgtagaagccaggctgtggcctgntgactcagaaaaagtccaaggactgaggggtgattgagatcaacgagc

SEQ ID NO: 49519 - DNA, 488 bp, Glycine max
  Clone ID: LIB3167-023-P4-K4-H2
cacggagtcacactaccactagtttttttgttcctagcgcttgtttatgtttgggggcagatttccctgactgcgcaacctcgtttcgtttccatggcttcaacacttcagaaactgcttcgaaaaccatcacctctaccacccttcagattcatcactgccctcaacccaccgcaaccccaaaaccaaaaccaaaaccccatcctcactctcactcgcgaccctccccaacaatgtaacgctcaacccttcgatgatgcccccaccgtgatctttcccagtttcccctttggcttcttcccaagacccgtttctgaaagcgggtttcgtggcggcgatgatgccggggtggaagaagaagactctggaaccctctgggcggacagcgtgaagaagaagcggtagaagaagatgaacaagcacatgtaccagaagctcaggaagcgcatgaggagacagacgtagaaggtgaggggccagaattcatt

SEQ ID NO: 49520 - DNA, 271 bp, Glycine max
  Clone ID: LIB3167-023-P4-K4-H3
gcgagcggccgctcgcgatctagaacgaggcagcaagttgttgaaaatgcatcacttaaaatattgaaagttgaagagaaactatcgaaaggatggggtggagataatgcttatcacgttagtgggtaccgctacttacttgtagatggagatagaaatgtatccagggcttctccagcaacaaaagttacaactttaacaaaggagtccttacttgctatgaataagcttaggcaagaggtggagtttgtgaagagtacagccaacctgg

SEQ ID NO: 49521 - DNA, 370 bp, Glycine max
  Clone ID: LIB3167-023-P4-K4-H4
cgccgcaggtaccgtccggactaccggtcgagctcgctacaggttaaatcacctctgaatttctgctatggcttcaaccagatcagtctttcttcttcttttcattcaattgtgcttctcacttctacccttgtcattcgctcaatcccccgccaccgggtctaccgaaggttacaccatttatggtcgagtgaagatccccagtgtgggaacaaaagattatattcttcctggaaaaatttcaaatgtcaaagtcatactcaatggtggtcaaagagttacttttctgaggcctgatggatatttgtcattccacaatgttcctgcagggacacatctaattgaagtggctgccataggctatttcttt

SEQ ID NO: 49522 - DNA, 139 bp, Glycine max
  unsure at all n locations
  Clone ID: LIB3167-023-P4-K4-H6
cccacgcgtacgcttgttttgtcatctaagaaaactttttnagagntnnntntttgtaatatttggtttttatcataagatgaagaagaagccccagttgtgacttatgaggcaacagaagtgtcagaggaagtgaagc

SEQ ID NO: 49523 - DNA, 456 bp, Glycine max
  Clone ID: LIB3167-023-P4-K4-H7
acaatttctctctcctctctctctctacaaatccttctttctttcttctcttcgctgctcactgtagccatggctttcagagtaggaggagcgggagggggaaatgcctcttctggcatgggtgttgctgagcatagtgtaaacaccttcctggaattgcagaggaagaaagttcatcgctatgtgatttttaaaattgatgagaaaaagaaagaggttatcgttgaaaaaactggaggccctgctgagagctatgatgatttcactgcatccttgcctgaaaatgattgccgatacgctgtctttgactttgattttgtgacatctgagaactgccaaaagagcaaaatcttttttattgcatggtctccttcagtggcccccattcgcccgaagatgctatatgcaacatccaaggacaggttcagaagggagctgcagggcattcattatgag

SEQ ID NO: 49524 - DNA, 441 bp, Glycine max
  Clone ID: LIB3167-023-P4-K4-H9
aaccaaggagcttggaactgttatgcgttcattggggcaaaacccaactgaggcagagctccaggacatgatcaatgaagtggatgctgatgggaatggtaccattgacttccctgagttcctaaatctcatggccaggaagatgaaggacactgattctgaggaggagctgaaagaggcattccgggttttcgacaaggaccagaatgggttcatctctgctgctgagctccgccatgtgatgaccaacctcggggagaagctcaccgatgaagaggttgatgagatgattcgcgaggccgatgttgatggcgatggccaaataaactacgaggagttcgttaaggtgatgatggccaagtgatcatcacattatcgccacaaaaacctaaatgaagaaatgttgattaaaaggaaacgacaaaaaaaggggtaggagga

SEQ ID NO: 49525 - DNA, 81 bp, Glycine max
  unsure at all n locations
  Clone ID: LIB3167-001-Q1-K1-A1
cccttttttttttttttnttttttttttttttttttttggtttggttttttttttntttttttttttttttttttcccccc

SEQ ID NO: 49526 - DNA, 332 bp, Glycine max
  Clone ID: LIB3167-002-Q1-K1-A1
gaaagagtctcgaacttcttcttgccagacctcgatgatgcccaattggcaaaggaagtcgaataccttctaaggaaaggatggattccttgcttggaattcgagttggagcacggtttcgtgtaccgtgagcacaacaggtcacctggatactatgatggacgctactggaccatgtggaagctgcctatgtttggctgcactgatgcttctcaggtgttgaaggagcttcaagaggctaagactgcataccccaatggcttcatccgtatcattggatttgacaacgttcgccaagtgcagtgcatcagcttcatcgcctacaaaccccc

SEQ ID NO: 49527 - DNA, 398 bp, Glycine max
  Clone ID: LIB3167-002-Q1-K1-A10
aacaaacccactaagatggcttcctttgtatccttcctagtgctgcttcttgcagcccttatcctcatgcctcaagggcttgctacttactacaaaccaattaagaagccaccagtgtacaagcctccagtgtacaagccaccagtgtacaaaccaccggtttataagccaaaaccaccggtttacaagccgaaaccaccggtttacaagccaccatataagaagccaccatacaagaaaccaccttatggaaagtaccctccagtagaggacaacacccatgcctaaagcaagcaatgaggtctattatctacttaataaataagaagaactgctttgtgttttctagcattgtgatttacaacttcgtagcaatgcatattcttgactcttgcatg

SEQ ID NO: 49528 - DNA, 381 bp, Glycine max
  Clone ID: LIB3167-002-Q1-K1-A11
cccacgcgttcgcagaggtgcggcccgtgacggcggcccatttgggtaaccgaaagaagcttaatgcgttgagcgaagatggagagagcagctaccatgggtcgatggaggataagcaattcgtgcgttcgtttcgcgaggcctggccttacttgtgggcctatcgtggtagcacctttgttgtcattatttccggtgaaattgtttctggccctttcttggatgtcattctcaaggatatagctttccttaatcacctaggaatccgctttgttcttgttccggggacacatgtgcagatagacaagcttctgaatgagagagggtgccagcctatgtatgttggtagatataggataactgatgatgaatctctggaaa

SEQ ID NO: 49529 - DNA, 396 bp, Glycine max
  Clone ID: LIB3167-002-Q1-K1-A12
cccacgcgtccgcccacgcgtccggaaaaccctagaacgggagagatttcattccccaaaaaatctcttccttctctctcctcatttctgagttcccaactttcctcacctgagcaaggaatgccgctggtattagcgaaaagcgattcgatccagattcgcgaggtatggaacgataacctggaagaggagttcgcgttgattcgcgaaattgtggacgattacccttacatcgccatggacacggagtttccagggatcgttctccgacctgtggggaatttcaagaacagctacgattaccattaccaaaccctaaaggacaacgtcgacatgctcaaactcatccaattgggcctcactttctccgacgagcacggcaaccttcccacgtgc

SEQ ID NO: 49530 - DNA, 386 bp, Glycine max
  Clone ID: LIB3167-002-Q1-K1-A2
agagaatcttccttttttgatcttgtagcttcccaactcactcccaagaccaatggatcatcaactcctgtgaggggagagacagtggccaagttgaaggtggcaatcaatggtttcggacgcattggtagaaacttccttcgctgctggcacggccgaaaagactcaccccttgaggtcgttgttgtcaacgacagtggtggtgtcaagaatgcttcgcacctgcttaaatatgattccatgctgggaacttttaaagcagatgtgaaaatactggacaatgaaaccatcactgttgatggtaagcccatcaaggttgtttcaagcagggaccctcttaagcttccttgggctgaacttggaattgacattgttattgagggaac

SEQ ID NO: 49531 - DNA, 316 bp, Glycine max
  unsure at all n locations
  Clone ID: LIB3167-002-Q1-K1-A3
gaactatgttgtcatggataagaggtgggataggattggagggtatattcggagagcttgatgtatcatatattgtgtggcatccctctggatgtggcgggcacagaattgttgagaagcatttttcatcttggaattcatctgtcttcgtaagtaggtttgtctgtagcaaaggagtggtgatgcttattttctttttgtaccctttttcagagttcacatttttttggcctttggaacattaatgtgaatgtctatagctacatgtatcgagaatttttatataagattgtccnnnnnnaaannnnannnnnaa

SEQ ID NO: 49532 - DNA, 395 bp, Glycine max
  Clone ID: LIB3167-002-Q1-K1-A4
cccacgcgtccgaaaccatgggaggataaacttttagagcatgccaaagctcttaaagtaaatgccggaactgaacctgatacagatcttggtccggtgatcagcaagcaggcaaaggagagaatacacagattagttcaatctggggttgaaagtggtgccagactactgcttgatggaagaaatatagtggtcccaggatatgaatctggcaattttattggtccaaccatcttatcagatatcaatgccaacatggagtgctacaaggaggaaatttttggcccagttcttcttttcatggaggctgatagcttggaagaagccataaacattatcaacagtaacaagtacggaaatggtgcttctatatttactacatctggtgttgctgc

SEQ ID NO: 49533 - DNA, 403 bp, Glycine max
  Clone ID: LIB3167-002-Q1-K1-A5
gccacgcgtccggtgaaagggggaaaaaattaaaatcaaagagccttatgtccgggatcattcacaagaatggggagacccttcatgtgtgaaggcaccagaaggaggaggagcgtataggtgtgcacccttctctagaatacacaagggagcaccctttggtaaacacagttgtgagcacaagggagagcatcatggtaaacacaaatctggagagcaccatggtgagcacacgccatagcacaaagaggggttcctagacaaagtcaaggacaagatccttggggagggcgccccctccgcgggcaagatgaaaaaggatggaaagaaaaaggaaggtgcccttgatcatggccatgacagcaacagcagcattgacagtgattaaactgctgcatcacct

SEQ ID NO: 49534 - DNA, 400 bp, Glycine max
  Clone ID: LIB3167-002-Q1-K1-A6
aactgctcttcacatggccatcataggcaacattcacactgatcttgtgcagctcctgatgactgcaccatcaataaatgtgaatatatgtgatgttgatggcatgaccccactagattaccttaggcaacaccccaaatctgcatcatcagatatactaattaaaaaattaatctcagctgggggaatgtttggttgtcaaggccatagttcaagaaaagccatagcatcacacttgagaatgcaaagcattggaagcagtcctgggacatcattcagagtctcagacactgagatatttttgtacactggcattgagaatgtgtcagatgctagtgctgctgatcatggaagtgggggaatgagttcatcttcatcagaacacattccatacgatccg

SEQ ID NO: 49535 - DNA, 304 bp, Glycine max
  Clone ID: LIB3167-002-Q1-K1-A7
cacatggtctgatagcacattacactgatcttgtgcagtgcggatactgctaatgaaaaaatgtgaatatatgtgatgttgatggcatgaccccactttattaccttaggcaacaccccaaatttgcgtcatcggatgtactaattaacaactgaatctcggctgggggaatgcttggttgtcatgtgcatatttcgagaaaagccgtaccttaacacgttgagaatgcaaatcattggaggcatttctgggacattgttcatagtctcacactctgatattttttcgacactggcattgtgaa

SEQ ID NO: 49536 - DNA, 386 bp, Glycine max
  Clone ID: LIB3167-002-Q1-K1-A9
ttcatacacagagtcagaaacacaaatctgggtatagaggagtagtacggtttttgcgtttgagagagaagaagcatgagcaggagtttgggaattccggtgaagctgctccacgaggcttcggggcacgtggtgacggtggatctcaagagcggagaactctacagaggaagcatgatcgagtgcgaggacaactggaactgtcaactcgagagcatgacctacactgccaaggatggcaaaacatagcaacttgagcatgtgtttattcgaggcagcaaagtcaggtttatggtcatccctgacatgctgaagaatgctcctatgtttaagcgtttggatgcaagaatcaagggtaagggtgcatcacttggtgatggtagggg

SEQ ID NO: 49537 - DNA, 98 bp, Glycine max
  Clone ID: LIB3167-002-Q1-K1-B1
cccacgcgttcgcccacgcgttcgcccacgcgtccgcccacgcgtccgcccacgcgttcgcccacgcgtccgcccacgcgtccggttctagatcgcga

SEQ ID NO: 49538 - DNA, 397 bp, Glycine max
  Clone ID: LIB3167-002-Q1-K1-B10
gagatttgagaattgactctgagaatcgagaaaatggccggtttaccagcgaggctccgtctccaacccaccgacgtcaaagccgccgccttgtggggcgttaccgccgccactggcgctctctacctcattcagccatggggatggttgaagaagacattcttggagaagccagaacctgagcaaaaatgagttggcttctgagaagagtggtttgaatttttggatcatgccaaggatgggtaacagtcgaatattgttaatttctgctgaggtcttctcgcacctgtgctttatgttatgaatttggatactaaattttaatgttctgcgctgattgtttttaacggagattttgttttaaatcaacttctcgcaccgtgttgaacgagcaaac

SEQ ID NO: 49539 - DNA, 379 bp, Glycine max
  Clone ID: LIB3167-002-Q1-K1-B11
cgcaaaaatggcacctgcaacactgtctctgtctctcctcctcctgttctcactcagcatcgccgtaaccgttagatcgagcgactacgactacgattgtgtgtacactgcatacgttagaaccggttcggtgttgaagggcggaacggactctaagatcgggctgaagctgtacgacaagtacggctactacatctacattaaaaacctcgaagcatggggcggcttgatgggcaagggctacgactacttcgagcgcggcaacctcgacatcttcagcggaaggggaccctgtcttgacggacccgtctgtgccgttaacgttacttctgacggatcgggttctcaccacggctggtaccttaactacgtccaggtc

SEQ ID NO: 49540 - DNA, 381 bp, Glycine max
  Clone ID: LIB3167-002-Q1-K1-B12
cccacgcgtccgcccacgcgtccgaaaagctgaactaacacactcgtacactgcttccaattccaccctctcttccattttttttttctttcaactactctgaagggttgtggattgtgatattctttacgaggaagaaaggaaccagaagtcaaagcatgagaagcaatcccacttccaatgccgaggttcttctgtcttttcttccttcctaaacccaatacaaggttgtcacttttattcccaccaactagagaagccaaagcaattcccatgaacaaaaccaacactttcaacaagaatcaagtattttgatttaaactcaaccccttcactcttctatttcttttgttcattcatacattcaaataataaattaaa

SEQ ID NO: 49541 - DNA, 98 bp, Glycine max
  Clone ID: LIB3167-002-Q1-K1-B2
cccacgcgttcgttcacgcgtacgcccacgcgtccgtccactcgtccgcccacgcgttcgcccacgcgttcgcccacgcgtccggttctagatcgcga

SEQ ID NO: 49542 - DNA, 400 bp, Glycine max
  Clone ID: LIB3167-002-Q1-K1-B3
aagagactctgccttattacggttcaagcagaagaagaaaactaggagacttgacaaacacataatgtatgaatcacgaaaagatccggcagaaagcagggtaagagtcaagggtcgatctgtcaagatggaacatgaacattgaaatcatggttggctgctatgacatcataactataattcccagctcaaatcacatgcactatgtagcatatcccttgtatagagaacttaacaaaattttccaagtgatgtattctaagattcagagctaggatataaggcagacatattcttgcagcacagtagtgcttttatcatcctttttgcttcataattgactgcacctgaagtagacaaatatgtgcagtattctgtaaatcaaaatcaaattgactgg

SEQ ID NO: 49543 - DNA, 358 bp, Glycine max
  Clone ID: LIB3167-002-Q1-K1-B4
cccacgcgtccgcaagtgtcatgttttcttgtgccagtatcttttagtaatacaagaagaagctattttcaaatcacgtgatatcacatgtaaaatatggaagttttaaatgaagaagaaaggaataaattcaatagtgtgcctatttgaattgcagagagaactgtctgacggtatgaagcagaagatacgggctgaatatgaggcgattggtggaagcccagataagcctctacagtcaaactattttctaaatatcataattattattgctgttttggcatttttgacatcactgcttggaaactagttggattttgttcttctgatttttactataattgcattggcattttgc

SEQ ID NO: 49544 - DNA, 399 bp, Glycine max
  Clone ID: LIB3167-002-Q1-K1-B5
cccacgcgtccggaagaaagctgcacgagtggtgtttatcccttctccaggagttggtcatcttgtgcccaccattgagttcgccaagcttctcatcaaccacgatgagcgtctctggatcagtgtgttggtaatggacaccacaagtgctgcttacacagagtcccttgcatcccaacgtctccagttcatcaacctccccgaatcaccctccaaatctgaaccagcaatgacctctctcctcgaacaacaaaaaccacacgtcaaacaagctgtctccaacctcatctctgacgactccgccccagcactcgccgcctttgtcgtggacatgttctgcacaaccatgattgatgtggccaaagacttgaaggttccttcgctggtcttcttcacctc

SEQ ID NO: 49545 - DNA, 406 bp, Glycine max
  Clone ID: LIB3167-002-Q1-K1-B6
cagcactcggaaatttctggcgatctctgcgttttcccctattttttctgaatctaacaacaaacattcctctggcaacaatcaatactattaataagagttccttccttcactctcacccaagccaaagaaaggaacaagaacaagaccaacaaagtaacgtgaaagagaaagagatggaggaaattgttccagtggtggatttccagaggctttcagaggaagaggagcgcaagaagctgagaaaaacatgtgagaaaccagggtgtttcagaatcatcaaccactcaattccactaacactcatggctgacatgaagtcagtggttaaatacttgcatgaccttcccgcggaaatcaaaatgcgcaacaaaccctcctccgtccctgagagtggctatagggc

SEQ ID NO: 49546 - DNA, 343 bp, Glycine max
  Clone ID: LIB3167-002-Q1-K1-B7
cccacgcgtacggagaagtcatttttgcccggagagtactccattgagatgtctacatagcagtctacaataattgggttttcactgaccaaaccttacacagctgatctcgtcgagaaaggattggcaattgaagatccctctgcaccccatggcctatcacttgtgataaaagactacccttatgctgacgaaggacttgaaatatgggatgctattacgacatgggttcatgaataagtgtgactggattacccaacagatgcagctgttcatcaagatactgaactacaaacattgtggaaagaaactgtggagaagggtcatggtgacttataagaaa

SEQ ID NO: 49547 - DNA, 396 bp, Glycine max
  Clone ID: LIB3167-002-Q1-K1-B8
ctcattcttcatccatagacatggccaccgtcacttctgcagccgttgctattccctcattcactggcctcaaggcaagcgcaggcaaagtgagtgccgcagttaaagtctcagctccccaagccacaaggttgggcatcaaggcttcgctgaaagacgttggagtcgctgttgtggccactgccgcgagtgcagtgctggctagcaacgccatggccattgaagtgttgctgggtggtgatgacgggtctctggctttcgttcccaacaatttctccgtggcctctggggagaagatcgtgttcaagaacaacgcatgtttcccccacaacgttgtgttcgacgaggacgagattcctagcggcgtggatgcagggaaaatctccatgagcgatg

SEQ ID NO: 49548 - DNA, 236 bp, Glycine max
  Clone ID: LIB3167-002-Q1-K1-B9
cccacgcgtccgctgagaaacgcaatgagttcgtcgaacctcatagatcttcaacgcgaattggagaacaaagccaatgatctcagcaagcttcaaaaggaaattgcgaagaatcaccaaatgagaaagaaatacacggtccagcttggctagaacgagctcgtccttaatgaactggatttattcgaaagacgacgcatatgtttataagtcgattgggccagtacttgttatgc

SEQ ID NO: 49549 - DNA, 171 bp, Glycine max
  Clone ID: LIB3167-002-Q1-K1-C1
gaacattacattcccagaaaatgatcttccggagaaagacgcgactgattttcataagctggtgtgtacgtgggtgccaaatgtggaggaccgggcattgcgctaaacaatgattcttctctttggctatagtctgagcatatggatcaacattcactcgcgactgctttg

SEQ ID NO: 49550 - DNA, 393 bp, Glycine max
  Clone ID: LIB3167-002-Q1-K1-C10
gttttcttcatatcttccttgtcactgcccgtgtgtcgccgccatggccaccgtcaccacccaagcctccgccgcaattttccggccatgtacctcgaaatcgaggtttttgaccggctcttccggtaaacttaaccgggaagtgactatgcggccaatggggtgccctccttctgcctctttcaaggttgaagccaagaagggagagtggttacctggcttggcctccccaacttacctcaatggcactcttcctggtgacaatggatttgaccctctggggctagctgaggacccatagaacttgaggtggtacgttcaagccgagcttgtgaatggacgttgggccatgttgggtgttgcaggaatgttgcttcctgaggttttcaccaa

SEQ ID NO: 49551 - DNA, 399 bp, Glycine max
  Clone ID: LIB3167-002-Q1-K1-C11
ctctgtctcgtgtacacatctctacaacctttcactttcgtttctcagctttattcgaatccctgtctcaatctgctttccaaatggccagcgttgaggttgcacagcaaacaccaacaacagctccagaaaatgaaacaaccgaggtaagcatgacccaggaaacaaccccagtcactgaggctcctgcaacagaacaaccagcagctgaggttcctgcaacagaacaaccatccgctgaggctcctgccccagaatcaaccaccgaagcaccaaaggaagaaaccaccgaggcacctacagaaacagtcgaaaaaacaactacagaagtagccccagaggagcctaaagaagttccagttgagaccgaggaagtggtggcaaaggagacagaggaag

SEQ ID NO: 49552 - DNA, 404 bp, Glycine max
  Clone ID: LIB3167-002-Q1-K1-C12
cccacgcgtccggagaaacagaaaacttcagaagaagagcatcaattgctagctccaatatattaccacaccactgcaaaattttctgaagcagagatcattgtccattatcacagaaatgggtgaaaacaaggaagaagaaaagaaagaagagaccacagaggaaaagaaggaaaaagagcctccagagatagtgctcaaggttgatatgcactgtgaagcttgtgcaaggaaagttgcaaaagcattgaaaggatttgaaggagtggaggaggtgactgcagatagcaaggcaagcaaagtggtagtgaaaggaaaggcagcagaccccataaaggtgtgtgagagactacaaaagaaaagtggcaagaaagtagagctcatttcacctttgcctaaacctc

SEQ ID NO: 49553 - DNA, 152 bp, Glycine max
  Clone ID: LIB3167-002-Q1-K1-C2
cttctgtgaatacctttgaacatttcattctcataaaatgatcttccggacaaagacgcgactgtttttcataagctgttgtgtacgtgggttccaaatatgtaatagcgggcatagtgctaaacaatgaatcgccctcttcggatttagtc

SEQ ID NO: 49554 - DNA, 333 bp, Glycine max
  Clone ID: LIB3167-002-Q1-K1-C3
gtgatttcagtgagtgatcggtgttcacttgatctcatcataatcggcagcgtcaactgaagaagatgccggtcagaaacatcgccgacacaaggcctgaagaggcgactcacccccacacgctgaaagcggatgtggctgagttcatcttaaccttcatgttcctgttcgccggctcatgctccagcatcgtctacaacaagctcaccgacaacggcgctgacacccctgccggcctgatgtccgtcttcatcgcccatgcattcgcgctcttcgtcgccggcttcgtctgcgccaacatttgcggggggcaacttaaccccagggtcacct

SEQ ID NO: 49555 - DNA, 108 bp, Glycine max
  Clone ID: LIB3167-002-Q1-K1-C4
cccacgcgtccggatttttttttcctccttattaatattaatttataaagaaaaataaattataggagttgcctataaaataacatggcctgtcagaaggactgatga

SEQ ID NO: 49556 - DNA, 399 bp, Glycine max
  Clone ID: LIB3167-002-Q1-K1-C5
cattgggctacttatgggcgccattattatactcgatatgactatgaaaacgtggatgcaggtgcagcaaaggaactgatggcatatttggtcaagctgcagtcctcactttcagaagtcaatcagattgttaaggggataaggtcagatgtttcgaatgttgtccacggtgatgaatttgagtacaatgatcctgtggatggttccatctcatcacatcagggaatccgatatttgtttgaggatggatcacgattgattttccgcctatctggaactggatcagaaggtgcaacaattcgattatacattgagcaatatgagaaggatccatcaaagattgggagactttcaaacgaagcacttgctcctcttgtggaagttgcgttgaaactttcg

SEQ ID NO: 49557 - DNA, 403 bp, Glycine max
  Clone ID: LIB3167-002-Q1-K1-C6
tgctcatcactccaaccttgctttccatagataacatcttcggcatcagacaatagacaaaaacatgcattccttaacatgcacaccactttcttcttcttattcttctcatcacaccactctaaagccaaacctcaaccctctgctgggtgctgatgcaacttttaggccatgttctctacccttgaaaagaagaacatgctttactaccagagccattctctcatccaccagagaagatgtcttgaagcatttcagcgagcgaagagctctcaagattatctcaggcctgcagaatttcaataaagacaatgttgcctcggttgtcactgctgctgacaagggtggagcaactcacgtggatatagcatgtgaccctgagttggtaaagctggccattggc

SEQ ID NO: 49558 - DNA, 379 bp, Glycine max
  Clone ID: LIB3167-002-Q1-K1-C7
cttctgtgttcaaccaatttggtttggcctgccaaagtgcctacatcctaagctgactgctaggtattacggtccctacttggtgctgataaaggttgaggtagtggctttccaacttcaattgccaaaacatgcttgaattcaccctgtcttccttgtgttgcaattgaagcgagctgtgggtcaacaacatctagtggaggcagaactacagcaggagttacagctagatcctattatttacttgccagctaaggtttttgctgagagtgtggtcatgcagaaggatgagcagatacctcaagtcctaattaaattaaatggcaaggaaaaactgaggaagaggcggcatggaagatgtacaagtcattcaggacta

SEQ ID NO: 49559 - DNA, 288 bp, Glycine max
  Clone ID: LIB3167-002-Q1-K1-C8
cccacgcgtccgctcagcctatataccttgaagagattacactatgcttcacacccccctatactctcatattgattactacttattttcaagggatcaatacaatataatggttcaaacatgctaacggtgtatgctcccagagcagttctaaagtgccatttacaccatgatttagattcttctcaactaccatattcatatccatgcaagatcaataactaagcctatgtggcgaattgcaatactaaacctgttggcactcccagtactaatatatcagtatat

SEQ ID NO: 49560 - DNA, 390 bp, Glycine max
  Clone ID: LIB3167-002-Q1-K1-D10
caaaacactatagcaatagaaacatttgcttttgaaaaacccctcactcttcatcactacactagctagccacatacaatgtcgaccaaatttaaggtgtttcgtgaattcacaagcgatgactcattcctaaaccaagttatccctgaaaacatcaccgaattccaagtgactctgtccctcgctagagactacgatggcaacaactcaaccaacggaaagttcattccttactgggacactgaaaaggtcactcccgaagtgataaaaaaattcaagaaaaaatacgaacccaccgcactgagggttaaggttcttgtcagcattggaaacaaaaacaaacaatttcctttcaccattggctcggactcgaacagcgaagcatgggtc

SEQ ID NO: 49561 - DNA, 340 bp, Glycine max
  Clone ID: LIB3167-002-Q1-K1-D11
gccacgcgtacggataactagactcagtgtgacgaaaacgaaggtacatgtgaccatcgctgctacaataacatgcatgcaaggctaggccatgctatcaagatgttgcctgtgataatgaacactgcctgttgtagcccgttctacataggtgaaacgcgcatgatagaaggttgatgtggaagcacacaacatgtgtggctttatgaccactgctgtagagagcgatttagcatcacaagaatacatgcgtggcgaactatatagatcagacttcaaatctgctaccaacacgcttacgtttatgccacatacctcatagaccatgctactgacacat

SEQ ID NO: 49562 - DNA, 110 bp, Glycine max
  Clone ID: LIB3167-002-Q1-K1-D12
gataagccttccacagcctaacaaaattgaggaccactccctggtcggttcctttctaccttgggccttctttaccttattccttcctttaagcaccggtggttttgtgc

SEQ ID NO: 49563 - DNA, 388 bp, Glycine max
  Clone ID: LIB3167-002-Q1-K1-D2
gttttaggcttgctgtggaagcacacaacatccgagcctttaaaaccattcctgaagagtgcgttgaaccaacaaaggactacattaatggcgaacaatttagatcagactctaaaacagttaaccaacaagctttcttttatgctagtgaacgcgaagtccatcacaacgacatatttatattcggcatagataacaccgtactctctaatatcccatactatgaaaaacatggatatggggtggaggaatttaatgaaaccttatatgatgaatgggttaacaagggcgacgcaccggcattgccagagactcttaaaaattacaacaagctgttgtctcttggcttcaagattgtattcttgtcaggaagatatcttgacaaaat

SEQ ID NO: 49564 - DNA, 395 bp, Glycine max
  Clone ID: LIB3167-002-Q1-K1-D3
ataacttctaacaccaaaaaaaaggaaaggaacttgagccacattttgtccctggtggactcaagaagagtctttcataggacagttaattaaaattatagcctgaaataagggttcactagcaatggcctcaacctcttctgctctcactatatcctcttcttccacccttcatgattgcaaggctccaagacagtcaccagctgcttcaccacaatgtgtgagccttccctctccccttttgcactctcagaactgttcatggaagaccactgcttattgtcgcagtattgctcgaaatgttatggcaatggccacaggagaggcaccagctgaagctgccccgactgaggtgccagagattgtcaagactcttcaagaaacttgggacaaag

SEQ ID NO: 49565 - DNA, 400 bp, Glycine max
  Clone ID: LIB3167-002-Q1-K1-D4
atgagataagccattgcattcactcaagtgagaaaaaaaaagtaacaaaaataaacaccaaaaacagatcagaacagagcaacaaccatggtgattcacagactcgaattgtgcataaccatggttcgactagccatagagttcgtcgtgagcgtcgcggaaacagtggtcatagttcaacagagaaccgctgagcctcttggaacgttgaatcgcgcaagtacacctcttcctttctatggctacctccgttgagttgaagaatatctcttatttattttcttttcttctgtgaaattccgcaatttgtatagaccctatgttttcttttccttttgggtgcatcaaacgctgattgatgcaaacccagttgttgttgttgtaaggaaaattgatgccc

SEQ ID NO: 49566 - DNA, 401 bp, Glycine max
  Clone ID: LIB3167-002-Q1-K1-D5
gtgattgttgtgactcgttcttcttcgtcgttatcttcttcttttgttgtttgtgtgtttgttttttctctcacctgaaaatgtcttgctgcggtggtaactgtggttgcggaagcgcctgcaagtgcggcaacggctgcggaggctgcaagatgtacccagacttgagctacaccgagtcaaccaccaccgagaccttggtcatgggagaagctacattcaagattaattgctttgcagaagaatctatgtctatgctgatgatggacaatttcgtgatggatatgttgaagatttcaatataattaaagctttttgtaaaaaaaaatatttgtaaaagcctttttgtccgacgagagaagaggggaaataaaaagtgtaagagtaaattatatcaaaaa

SEQ ID NO: 49567 - DNA, 403 bp, Glycine max
  Clone ID: LIB3167-002-Q1-K1-D6
cccacgcgtccgaacactgcactgtgtggaaacgaaacatggcaagagtggtggcactccaacagaaccaactatctttctctaccttagcttcctctctttctgacttcagtggaaccagacttcaaactcaacttcagttcaagagaaagcaatgccatccaaaagggtctttctacgtctccgcatcgagcaccaagaaaatcctaataatgggaggcaccaggtttattggtgtgtttttgtctaggctccttgtcaaagagggtcaccaggtgactttattcacaagaggtaaagcgcctgtcactcaacagttgccaggtgaatcagacagtgattatgctgatttttcttccaagatcttgcatttgaaaggagacaggaaggacttcgactttgt

SEQ ID NO: 49568 - DNA, 308 bp, Glycine max
  Clone ID: LIB3167-002-Q1-K1-D7
cccacgcgtgcgaacactgcactgtgtggaaacgaaacatggcatgagtggtggcactgcaacagaaccaactatctttctctaccttagcttcctctctttctgacttcagtggaaccagacttcaaactcaacttcatttcaagagaaagcaatgccatccaaaagggtctttttacgtctccgcatcaaacaccactaatatcctaataatgggaggcaccagatttattggtgtgggttggactaggctccttgtcaaagagggtcaccaggtgactttattgacaagaggccgagcgcctgtc

SEQ ID NO: 49569 - DNA, 52 bp, Glycine max
  Clone ID: LIB3167-002-Q1-K1-D8
agactgcgcatattcaccaaagattaccataaaaggtgcagatgtgcgcctg

SEQ ID NO: 49570 - DNA, 345 bp, Glycine max
  Clone ID: LIB3167-002-Q1-K1-D9
tgcatgcgcaataatattaatgcacgcagaggtggctaagctcaatgcgaatgagtggtacttcttcagtttccgggaccgcaaatatgctactgggtttcggaccaaccgggcaactacatcagggtattggaaagctacggggaaggatcgtaaggtggaggatccagccacgcaagaggttgtagggatgaggaaaacactggtgttctacaggaacagagctccaaatggcatcaaaacgggatggatcatgcatgaattccgcttggagaccccacatatgcctccaaaagaagactgggtgttgtgtagagtcttccacaaaagccaagaaaatgacca

SEQ ID NO: 49571 - DNA, 399 bp, Glycine max
  Clone ID: LIB3167-002-Q1-K1-E1
cccacgcgtccgcccacgcgtccggttgtttgttccgaacccaaccatggaagagttcagatccaaatcgtacggtgacggaaggatgcagattgaggcctaccgtggaaccaacatgcaagatctccggtgctacagcgcctcctacgcctcttcggtgcacccaacaacaacacagcaaacccagatgggaaataacgacgccaagtttaagaagggaaagtcaacgaatgggtccacatccaaaagttggagctttagtgaccctgagttgcagaggaaaaagagggtcgctagttacaaggtctatgctgttgaaggaaaactcaaaggctctctcaggaagagtttcaagtggttcaaggacaggtgcaacagagttgtctatggctggtagtt

SEQ ID NO: 49572 - DNA, 394 bp, Glycine max
  Clone ID: LIB3167-002-Q1-K1-E10
cggcttcgttgcttcggacaacactgtgtacctcaaaaccctaaaaaagggtgatgtcatggtgtaccctcagggcttgttgcacttccagatcaacgatggagagtctcaggctttggcttttgtgagcttcagcagtgctaaccctggcctccagattctggacttttctttgttcaagagtgatttccccactgagcttatcacgcaaaccactttcattgatgctgcagttgtcaagaagctcaagggtgttcttggagggtcaggttaattaaatataattaacgcgtgttgatgtgtttttaattaaacggagttgttcattcaaaacacaagagtctagagtgtgttgtgttgtgtcatttttgttaaatttggttgttttggtttt

SEQ ID NO: 49573 - DNA, 393 bp, Glycine max
  Clone ID: LIB3167-002-Q1-K1-E11
aaggggtgccctgagatcactttgagcaatggtgaaggctgtggcagttcttggcagcagcgagggtgtcactggaactattttcttcactcaggagggaaatggtccaaccaccgtaactggatctcttgctggtcttaagcctggtctccatggcttccatgtccatgccttgggggacactaccaatggttgcctgtcaactggagcgcatttcaatcctaataacaacgagcacggtgcccctgaggacgagaatcgtcatgctggtgatcttgggaatgttaatgtcggtgatgatggtaccgttagcttcagtattaccgacagtcagattcctctcactggaccaaactccatcatatgaagggctgttgttgtccatgctgattc

SEQ ID NO: 49574 - DNA, 395 bp, Glycine max
  Clone ID: LIB3167-002-Q1-K1-E12
cacaagtgatgcagaactattgtgtccaacaatgttgccccatctggctggtcctttggccaaacctacactggtgctcaattccgctagatcttgttgtccaaagttctaagtcacacattcaaatactactactatatagcataatagatatatggtattagtaggttctaagagtattattattatgagtttatgatgactggttagtatactagggtattagatagtatgctgctaggggaaggggtcagttttttggtaatttttgaaggccagggaattaagatttaagaaggggtatgttttaaattgctccttcattttaattttaatttcttttgtgtcaacaagtggggacctatttttttaggcccttcttgattacaggggtg

SEQ ID NO: 49575 - DNA, 396 bp, Glycine max
  Clone ID: LIB3167-002-Q1-K1-E2
ctttcaaagaaaaaaggagagtgcttagagagagagcaaaacatattattttcattttcatctttttttgagtatcaacaaatggcaaccactgtgatgaccactctcccccaattcagtggtcttagaccccaattctcagctgcccctgtgaagaacttggttgctgtgcaacccatgagtcgcaaggggaagggtgcattgggagctcgatgtgactacattggttcatccactaatctgattatggtggcttctacaaccctgatgctgtttgctggaaggtttggattggctccatcagcaaacaggaaagccactgcagggctaaagctggaagtgagggactcaagcttgcagactggtgaccctgctggcttcacccttgctgacacc

SEQ ID NO: 49576 - DNA, 399 bp, Glycine max
  Clone ID: LIB3167-002-Q1-K1-E3
gagaagatgacgcggggaaagcagaagatcgaagcgcagaagcgaaacgcagagaggaatcagaagggaaagggctctcagctcgaggccagagccgttggcctcaaagtcatctgccccatctgcaaggcccaacttgcaaatcaaaaccaactggttgatcattatgcttccaaacatccgaaggagaaacctcctgcagagtcaagctagttatatttgagcaaatggtacaaaaagtccccaaaaaaaaattgctctctaggtgtgccttcgtgcttttaatgtaattctccctgcttgcaggcaggttgcaacatgttttaagttaatcatgttaatgtgcattattgtgagatcctaaaggatcataaaaactgcgtctatcattataagaaa

SEQ ID NO: 49577 - DNA, 403 bp, Glycine max
  Clone ID: LIB3167-002-Q1-K1-E4
ggtgagggcagaaatggcggcggctacggcaatttctcagcttggctgcttctccgccgtccaccgcagctcccacctccggcggcgctcgcttctattcccttgccctcgctccaagttatcagttgttatgagtctggagaggcatgacacagatactgctgggtctgataccaaaaatacactaagttatgcagctgatgtgtcaaagctacatgttgaagaaaaaaagcactcatattctacaaaagatggccatgatactgaaaaattaggttttggagaggcaacacaggaaagtgttcatcaaccgaaaaggactgcaaagattcatgacttctgtttaggcatcccctttggtggatttggtttaactggagggattattggattcctattttca

SEQ ID NO: 49578 - DNA, 402 bp, Glycine max
  Clone ID: LIB3167-002-Q1-K1-E5
attcttcttcgcagcattggcgcgagtggatctggacgggaaccccatgaaggcacttacgatctgcatgatcggcgctggcggcttcataggctcgcatctctgcgagaagctcatgtccgaaacccctcacaccgtcctcgccctcgacgtctacaacgacaagatcaaacaccttctcgaaccctccgattccccctgggccggccgcatcaccttccaccgcctcaacatcaaacacgactctcgcctcgaaggcctcatcaagatggcagatctcactattaatctggctgccatttgcactcccgcggattacaacacccgccctctcgacaccatttacagcaatttcatcgacgcgctccccgtggtgaaatactgttccgagaacaacaagcg

SEQ ID NO: 49579 - DNA, 406 bp, Glycine max
  Clone ID: LIB3167-002-Q1-K1-E6
cccacgcgtccgcccacgcgtccgcccacgcgtccgtcttcccatattgttctcgtgtgttgtgtgtgtcagtgttttggggtgtgtgtgtgagtgagtgagagaaagagaaaaaaaaaaaagaaaaaaagagtgtcttgggcggtttggtttgggtttaacactttcatttcgaagatgccacgcccagggccaaggccttacgagtgcgtgagaagggcttggcacagcgagcgccaccaacccgtgagaggttccatcattcagcagattttcagggtcgtcaatgacgctcacagtcccgcgaccaagaagaacaaggaatggcaagagaagctccccgtggtggttctcaaggccgaagaaatcatgtactccaaagccaattccgaggcagagtacttga

SEQ ID NO: 49580 - DNA, 380 bp, Glycine max
  unsure at all n locations
  Clone ID: LIB3167-002-Q1-K1-E7
gttctggtttatagatctttgcgaaggaggtttacagcgctcaaccaaagatgcagaacgaggaaggacagatcactgagctttacattcctaggaagtgctccgccacaaacagattgattaccgctaaggaccatgcttcggttcagatcaacattgggcatgtggatgagaatggcgtctacaatggccatttctccacttttgccctctgcggattcatccgtgctcagggtgatgctgacagtgctctagaccgcttgtggcagaagaagaaagttgaagttaagcaacagtagacacccatgatagtttgttacttcgttatgtattaatttctactcttgctagagatatttgagtactnnnnnaaanaaaaa

SEQ ID NO: 49581 - DNA, 341 bp, Glycine max
  Clone ID: LIB3167-002-Q1-K1-E8
cccacgcgtacggacgcatcagggcacttcacaagggttgctagaattagccaagctaggcggctatgacaccgttagcataatcctgcatgtacactgtcaataacaatgccaagcatattcgcacgccaaaggcacatagtgtgtacattcaatatccctcacaggcgacactaccgccttatccggcggaactcaggaagacgtcacgggagatggctaagaaacagaacagttcgtcatacctcgagtggttgtctgtactgcaccacatagtgtcggcatcaacttcagggatcatgcacccaacatgccaaatggcatgccaggtaatgatccat

SEQ ID NO: 49582 - DNA, 394 bp, Glycine max
  Clone ID: LIB3167-002-Q1-K1-E9
gtttgagactctttcctacctgccagaccttgatgatgcacaattggcaaaggaagtagaataccttcttaggaagggatggattccttgcttggaattcgagttggagcacggtttcgtgtaccgtgagcacaacaggtcaccaggatactacgatggacgctactggaccatgtggaagctgcctatgtttggttgcactgatgcttctcaggtgttgaaggagcttcaagaggctaagactgcataccccaacggcttcatccgtatcatcggattcgacaacgttcgccaagtgcagtgcatcagcttcatcgcctacaagcccccaggcttctaagtgtgaaaaatttgcaaagcatttgtagccgccaccccactttgtttgtttgta

SEQ ID NO: 49583 - DNA, 391 bp, Glycine max
  Clone ID: LIB3167-002-Q1-K1-F1
ccagattcaaccagttaaacttggaacccaaggctttgaggtttcaaaattgggattcggatgtatgggccttactggagcgtacaatgaccctctccaagaacaggatggcatatctgttatcaagtatgcgttcagtaagggaatcacattttttgatactgcggatgtttatggagccaatgctaatgaacttttggttggaaaggctttgaagcagctgcccagagaaaagattcagatagccacaaaatttggtattgcttcacgaggttttcctgatttgaagatcaagggttcgcctgaatatgtgcgatcatgctgtgaagctagcttgaagcgtcttgatgttgaatacattgatctctattatcagcacagagtggacaca

SEQ ID NO: 49584 - DNA, 187 bp, Glycine max
  Clone ID: LIB3167-002-Q1-K1-F10
atcgcctacaagcccccaggcttctaagtcattgaaaaatttgcaaagcatctgtagccaccccactttgtttgttgtacttaaactacattcccatttgtttttgctttatgagatttcatcatcctgtatttttggtttctgttttcggacttcaatggaaattaatggatgagaactaatgaat

SEQ ID NO: 49585 - DNA, 164 bp, Glycine max
  Clone ID: LIB3167-002-Q1-K1-F11
gttatgcgtcggttcactggttctgtttgacgatggtgaggagaatatggacctgagagtgagctgtgaagcatcattagcactagtagcatagccatgccgtggtgcaagctactcgattggagccaccccgaatctgaactggctatagagaaccttcctta

SEQ ID NO: 49586 - DNA, 393 bp, Glycine max
  Clone ID: LIB3167-002-Q1-K1-F12
gcggcattggcggcattggctgtgctggttgaggttgaggggagataggatgtactatacgaagtggagctacctgtgattgtgcataatcctttcttctattttggtggtcttggaggctttggttcctttggacctcccaggaatttaatctcaagcttttttgggggtagggacccatttagtgaccctttcttcgcccaaccttttggagggatgtttgagtctagtccctttggtggtcctactggatttcctttccccactggtatgaatccatctgggttccttgagcatccagccccgggtttggatccatctgggttccttgagcatccggctatgcatccatctgggttccttgcacggcaaaatccagagcctagtagacaa

SEQ ID NO: 49587 - DNA, 398 bp, Glycine max
  Clone ID: LIB3167-002-Q1-K1-F2
aaaagccttagccttccctacaactccaaacacaaagacatcatcatccatggctgcctccgtctccactgtcggagctgtcaacagagctcttttgaacctgaatggttctggagctggagcttcagctcccagttcagccttctttgggaccagcttgaagaaggttattgcctcaagggtccccaacagcaaggtttccggtggaagcttcaagattgttgctgtagaagagaagaaagagattgaagagacccagcagaccgacaaggacagatggaagggtcttgcctatgatatctcagacgaccaacaagacatcacaagaggaaagggtttggttgactcccttttccaagctccacaggatgctggaactcactatgcagtcatgagct

SEQ ID NO: 49588 - DNA, 391 bp, Glycine max
  Clone ID: LIB3167-002-Q1-K1-F5
ctccacccaaaccctaactcccgaccctgttcccctctcgtatccgtcatgaaaggaggaaagtccaagaccgaatctaagagagccgatcccaaacttgctgtgaataagaagggagccgccaccaaggctaggaaacccgccggcaaggggaaggcagcgaaagaccctaacaagccaaagaggcctccaagtgctttcttcgttttcatggaggagttcaggaaggtattcaacaaagaacatcctgaaaacaaagcagtgtctgctgtgggcaaagctgctggagcaaaatggaagaccatgtctgatgctgaaaaagcaccttatgtggcaaagtctgagaaaaggaaagtggagtacgagaagaacatgagagcctataacaaga

SEQ ID NO: 49589 - DNA, 404 bp, Glycine max
  Clone ID: LIB3167-002-Q1-K1-F6
gaagaagtgaagagaagagaagagaagggatttggatctgaaaagagaagatggggggaggaatggaagcaaacaagaacaagttcatagaggattggggcactgccagagagaatctggagttcaatttccgttggactcgccgcaaccttgctcttgttggcatcttcggcatcgctattcccgtcctcgtctacaagggcatcgtccgtgaattcgtaagtagtcattttccaattcccaattagggctttctttatgaacgaatcactttagggcttttcattctacctatgcgttcgattctttttcttccttctttatgttatacttggattttcactttcttttaacaactatatctctccttctgctgaaacatgttttattttaaaaaacaatca

SEQ ID NO: 49590 - DNA, 397 bp, Glycine max
  Clone ID: LIB3167-002-Q1-K1-F7
gaagaagtgaagatatgagaacagaacgtatttggatctgataagagaagatggggggaggaatggaagcaaacaaagaacaagttcatagaggattggagcactgccagagagaatctggagtatcaattggcgctggactcaacgctaccttgctcttgttggcatgtttggcatcgctattcccttcctggtctacaagggcataagccgtgaattcgtatgtaggcatgtttcaattaccaaattagggctttatttattgaacgaatcactctatggcttgtgattgtacctatgcgtgcgatacttggtataccttttttattgcatactaaggatcttcactttcttttaacaactatatgtatgcgtatgatgatacatacattatttt

SEQ ID NO: 49591 - DNA, 147 bp, Glycine max
  Clone ID: LIB3167-002-Q1-K1-F8
atcacgcgtacggtcgtatatgagcacttccaaagggcctcgagaaactgccacgctcggcgtgtatgtgacacgtagcaccattctcatgtacaccgtacaccacaatccacagatccttctcacggtcacggcacataggtgata

SEQ ID NO: 49592 - DNA, 395 bp, Glycine max
  Clone ID: LIB3167-002-Q1-K1-F9
tcatctcttgcttccttcgtatagggataagagagcagcaagtaatgatggatgcgctgataaaggtgcagttcatcgcaccaaaaccataaaaagcgcttctttcgtcttatggcatgtctgaggaggaagaagcactgcgtcaaaggccaacatcgttgatttctttcccaccccatgacaattcttcgcttcttctgccacttctttatactcttcttcactccaatagcttctgtgcaagcgttcaccggaacctatggtataaattatggtaggattgcaaataatattccttcacccgatgaagttgttactcttctcagagcagcaaaaataaggaatgttagaatctacgatgctgatcacagtgttctcaaggcatttagtggaac

SEQ ID NO: 49593 - DNA, 289 bp, Glycine max
  Clone ID: LIB3167-002-Q1-K1-G10
gttcgatccttcacgctgaagggcgtcacggagccggaagacctcgcgccttcgatgatcgactaatatacgattctcgctgtcgccgccgcctttgaggtaggctgcgaccgtgatgaacatgactggaaggaactcctcgctttggaaagcgaccgcctttgggtccgcgacaatggcctcaagctcaatggcgtggattgcgaagagggcgagacgtcactctctggcgtggccgcccttacggaaatgggctcggcaacacctcggtcgcctccgattgactccc

SEQ ID NO: 49594 - DNA, 398 bp, Glycine max
  Clone ID: LIB3167-002-Q1-K1-G11
agaagaacaagtagttgagaactaagaaggagaagcaaatggcttcctcaatgatctcttccccagctgttaccactgtcaaccgtgccggtgccggcatggttgctccattcactggcctcaagtccatggctggcttccccaccaggaagaccaacaatgacattacctccattgctagcaacggtggaagagtgcaatgcatgcaggtgtggccaccagttggcaagaagaagtttgagactctttcctacctgccagaccttgatgatgcacaattggcaaaggaagtagaataccttcttaggaagggatggattccttgcttggaattcgagttggagcacggtttcgtgtaccgtgagcacaacaggtcaccaggatactacgatggacgc

SEQ ID NO: 49595 - DNA, 397 bp, Glycine max
  Clone ID: LIB3167-002-Q1-K1-G2
ggaaaacaaatccttaataagctcaaggtaaaaaagaaatggatactctgattactctaagctttcgattccgagattgggaaacattaagaaagaatagacttgtatcatacgttgggtgtgtgccatagttagctagagtgaaattctttttgaataattagcacagagggagggttttgattatatgattttttatgtacaaggtaaattgataatgagctctgattcaaaccacttagtttcatttgcccctagttgagactacttcaacgctttagcagaaaatttgttcttgatatattggactatattgttctcagttgctatttcctgtatatggtgggaactatattcattatgtgattgttatacaatttggtcaatgaaaacacgt

SEQ ID NO: 49596 - DNA, 403 bp, Glycine max
  Clone ID: LIB3167-002-Q1-K1-G3
cccacgcgtccgcaatttcaatcaacggttatacccttttctatttgagcatcatcatgtccaccgcagcgcagcccaaggccaagaaaacggcgtcgtccaagaagcccctctcccatcctaccttcgccgtgatgatagcggaggcgatagcgagtctgaaggagagaaccggttcgagccaatacgcgataaccaaattcatcgaaggcaagcacaaggagttgcctccaacctacaagaagcttgttctcgttcatctcaagaagtctgttgctgctggcaagctcgttaaggtcaaaaactctttcaagctcgcaccgactaagtctgctcctgttaaagccgctgctgctcccaagaagcccaccaaagctgcggctaagcccgccgccaagcccgg

SEQ ID NO: 49597 - DNA, 403 bp, Glycine max
  Clone ID: LIB3167-002-Q1-K1-G4
cccacgcgtccggaaaagaatgatcccgagcatgcaaaaaagcttgcctctctggcagatctgtttgtgaatgatgcatttggtactgctcacagggcacatgcatcaacagagggtgttactaaatacctgaagccatctgttgctggttttcttttgcaaaaggaacttgattaccttgttggggcggtatcaagccccaaaaggccatttgctgccattgttggtggttccaaggtctcatctaaaattggagtgattgagtcacttttggaaaaagttgacattcttcttcttggtggaggaatgatcttcacattttacaaggcacaaggtctttcagtgggttcatcccttgtagaagaagataagttggatcttgctacatcactacttgcaaaag

SEQ ID NO: 49598 - DNA, 396 bp, Glycine max
  Clone ID: LIB3167-002-Q1-K1-G5
cccacgcgtccggaaaagaatgatcccgagcttgcaaaaaagcttgcctctctggcagatctgttggtgaatgatgcatttggtactgctcacagggcacatgcatcaacagagggtgttactaaatacctgaagccatctgttgctggttttcttttgcaaaaggaacttgattaccttgctggggcggtatcaagccccaaaaggccatttgctgccattgttggcggttacaaggtcttatctaaaattggagtgattgaatcacttttggaaaaagttgacattcttcttcttggaggaagaatgatctctacattttactaagcacaaggtctttcaaggggttcattccttgataaagaagatcaaatgggatcttgatacatcactact

SEQ ID NO: 49599 - DNA, 299 bp, Glycine max
  Clone ID: LIB3167-002-Q1-K1-G6
ctcagacctatacctaaggttttcgttacacaatgaaatgcctttgccttgtgccggcttttgctgctagtgccgatcttgggttaagagcctatggacgcccctcaaacagaaagtgctgttatgagccacctcacttgcactcacggtgagtcgctcaccctacattcatatgatcagcagctatatcagcgatgccagaattagaagagaagctagtgattgatggatagatggcttatttgctaggttaagatctgataaagagctctgattcaggcatgactaagagcgctgga

SEQ ID NO: 49600 - DNA, 307 bp, Glycine max
  Clone ID: LIB3167-002-Q1-K1-G7
ctcagacctatacttaaggttgacgctatacattgaaaagcgtttgcctcgtgccggcgtgtgctgctaataccgcacttgggttaagatcctatggacgccccacaaacttaaagtgttggttagtgccacttcacttgcattgacggtgagttgctgcagcatagatccagatgttctgggagtctataaatgatgccggaatatagaagaaaggcatgtgtttgatgcgatagcaggctattatgctagatagggatgtgagagacagctttgattcaagcatcactaaaaacttttgatggag

SEQ ID NO: 49601 - DNA, 63 bp, Glycine max
  Clone ID: LIB3167-002-Q1-K1-G8
cccagacctaaatataagaaagacgttacacatcgataagggattgcctcacgccaggggggg

SEQ ID NO: 49602 - DNA, 398 bp, Glycine max
  Clone ID: LIB3167-002-Q1-K1-G9
gttcgctcctccacgctgaagggcgtcacggagccggaagaccgcgcgccttcgatgatcgacgaatatacgattctcgctgtcgccgccgccttcgaggaaggcggcgaccgtgatgaacgggctggaagaactccgcgttaaggaaagcgaccggctttcggtcgtcgccaatggcctcaagctcaacggcgtggattgcgatgagggcgagacgtcgctcgtcgtgcgtggccgacctgacggctaggggctcggcaacgcctcagtcgccgccgtcgacacccatgtcgatcaccgcatgggcatgagcttcctcgacatgggcctgaggtctgaaaaccctgactcggcggacgatgccacgatgatcgccacgagcttcccggagttcatgg

SEQ ID NO: 49603 - DNA, 402 bp, Glycine max
  Clone ID: LIB3167-002-Q1-K1-H1
attcagtcattcaacacctcactcactgattctcagaacacaaaagatggtgatgatgatgaagaaacaccttctcttctcactttcacttctcctaatggttctcttcacttcagctcaaaccaccccagcaccatcaccttcctcagccccaacagacatcatcagaatcctcaaaaaagccggaggattcaccacccttatccgtctcctcaccacaacacaagtctcaacccaaatcaacgcccagcttttgaactcaaacaacggattaacagtgtttgcaccaaacgacaatgccttccaaagcctcaaacccggcttcctcaactccctcaacgatcaacagaagaatgaacttatccaattccacgtgctaccaacatttgtttcaatctcaaa

SEQ ID NO: 49604 - DNA, 261 bp, Glycine max
  Clone ID: LIB3167-002-Q1-K1-H10
gtctttgttacaaccatgaaatgagttctattcttgtcacactgtgatgactactatagagttacatacccctgttcacctggtgctgttttctatggtcttgcagctaatgcgattttcaagaactacaactatggtagctgtggaaaagctttgaagatcgacctactcagccatccataatacatagagctgaatgccacccttgtcttccaggctgctatgtgtagatggatgaaccctatgaaaaagtaagagtcc

SEQ ID NO: 49605 - DNA, 390 bp, Glycine max
  Clone ID: LIB3167-002-Q1-K1-H11
cccacgcgtccggtcatatctggacgagaaaggggtaaagttggggagattactaaaatcttcaagcataacagcactgttatagtgaaagatttaaatttgaagacaaagcatgtgaagagtagagaagagggtgaaccggggcaaattattaagattgaaggtcctatccacagctcaaatgtgatgctctactccaaagatcagaaggtagcaagtcgtgtggggcataaagtcctagataatggtaaaaaagtccgctaccttataaaaactggagaaataattgatagttcagagaactggaagaaactgaaggaggctactaagaaatctgaagaagctgctgctgctgctgcctaattttacttatgtaattcattcattcac

SEQ ID NO: 49606 - DNA, 316 bp, Glycine max
  Clone ID: LIB3167-002-Q1-K1-H12
cactgtgttactattgtgctcgcacgagtgaattatcattaatcagagcttggtcttgggtggtgccagtgtgccacactatgctcaagcagaatttggggttcgtttttgctgaaaaccatgctgagagagaagagataattgtaccctcagggaacttttggggtgtcagtacagtaaaagagtcaaaagtggcatagtttatgttagggatagggtaggtaggtaattaaaggggctatatgaagcaggtgttcctgctgaacatgtatattacaaattagcctttttataattcaagttgaagatacaactc

SEQ ID NO: 49607 - DNA, 401 bp, Glycine max
  Clone ID: LIB3167-002-Q1-K1-H2
cccacgcgtccgcccacgcgtccggtttgttgtgagctataagctagtttatcgtgaggagaatatgaagttgtttgttttctttgttgctgcagtagttttggtagcatggccatgccatggcgcatgctaccaaaggttccctctccgaatgaaaactggctatggtgagcgttcttcggaggtaaaatgcgcaagttttaggcttgctgtggaagcacacaacatccgagcctttaaaaccattcctgaagagtgcgttgaaccaacaaaagactacattaatggcgaacaatttagatcagactctaaaacagttaaccaacaagctttcttttatgctagtgaacgcgaagtccatcacaacgacatatttatattcggcatagataacaccgtac

SEQ ID NO: 49608 - DNA, 288 bp, Glycine max
  Clone ID: LIB3167-002-Q1-K1-H3
cctgcacgtaccggtactgaatggtcggaccaacccgtccgcccagccttcggtaaaaggggtgaaaaactttaaacttctattggattccaactgggagttgctatatttttaactttcgatgccaaaagagaatggtggccttttgatgctcttcaaggtaatatcagaactcttgcatttcttgaggtgttagaacagaattttagttgactgcattattgtcagatttttgaaaggtgagtatgttgcttcgtggcttgcaaatgtgttaatcactactttgat

SEQ ID NO: 49609 - DNA, 357 bp, Glycine max
  Clone ID: LIB3167-002-Q1-K1-H4
cccacgcgtccgcccacgcgttcgtccacgcgtgcgtccacgcgttcgcgtgaatttatgtctaaattgggtgacctgaagcagacacatatttatgcaaagattgaaaatatagagggaatgaaacattttgatgaaatattgagagaagcagatggtatcatcctcgctcgcggaaatttagggatagaactcccacctgagaaggttttcttattccaaaaagctgctatttacaagtgtaacatggctggaaagccagctgttgttacacgtgttgcggactctatgactgataatctaagacctactcatgctgaagcaacagatgttgccaatgcagagttggattgaagt

SEQ ID NO: 49610 - DNA, 404 bp, Glycine max
  Clone ID: LIB3167-002-Q1-K1-H5
ggatgattccagaggtgttgcagaggcactgaatgaaacagtttgcattcatgataactgcactgggttaactgtgcttgggaagtactatttcagaattgatcctgtaggagagggtgccagatggcgccgatcatttgctcaggagatatactcacccttgcttttagccttcacagagggtgaaggtcactggggagattctcatgtcacaaccttctcagcaatagattcctcatacaacttaccagataatgttgccataataaccctccaggatctgggtgatggaagagttctcctacggttggcacacttatacgagattgatgaggacaagtatctttcagtgaaggcaactgtagaacttaaaaaggtgtttcccaacaagcagataaacaaaa

SEQ ID NO: 49611 - DNA, 392 bp, Glycine max
  Clone ID: LIB3167-002-Q1-K1-H6
cccacgcgtccgggtagattttaaagaaaggggagcttcaggtagctgggaaagagagggaatcattgttatcgagtcagttcagggatattgcgaccatcgtgatgcacaagacttacaatcccgagactcagcgtccatacactatcagtatgattgaacgcctcatgcgggaaatccattttgctgttgatccacacagcacctccaagaagcaggctctggagttaattcaagaacttcagaagcacttccctataaaacggtgtccgttgagaatacgtgctactgctcctgatgaccaagtgcctgaacttttaagaaagctgaatgaatggaatgctattggtatttctaaagaaggatcttctgctcaggtatccggtattttt

SEQ ID NO: 49612 - DNA, 391 bp, Glycine max
  Clone ID: LIB3167-002-Q1-K1-H7
cttcttctttcatcattcatcgcctttcaccacgcacgcagatcctttattcctataatccttccttcgctctctccaaatttcgactctttcgatcagatccgcgacacccaccccaccaaaaccttgcgcaacccatccatgacgcttggctcaggaggatccagtgtcgttgttcctaggaacttcagattgctggaggagcttgaacgtggtgaaaaaggaattggagatggcacagttagctatggaatggatgatggtgatgacatttacatgcgctcttggactggcacgattattggcccccataatactgtacatgaaggaagaatttatcaactgaagctgttttgtgataaagactacccagaaaagccccctagtgttc

SEQ ID NO: 49613 - DNA, 399 bp, Glycine max
  unsure at all n locations
  Clone ID: LIB3167-002-Q1-K1-H8
aaaaagcggtccgaagtgaacgtgggaaatgtacatatatgctacactagttgcattacacagaaaagggtatnaatatcacacatattggggatgacctgttcatgtggttggtgccaccagggctaaagtgcataacagtgatgcaacatacgaacacattactaaggtgtgctcaattggaaagaggagcttgggttcatcagaaagggtattgaattacacgtatctaaagagagagagattgagcacacgcaaaagcactaagaggtgtaactagagtgagtgtacggcatgatacctgttaggaggcagacgtaaagacaccatttggatatacaaggaaagatgtcctatgaacttgacctggagctacttcactagagattgacttaaaaa

SEQ ID NO: 49614 - DNA, 391 bp, Glycine max
  Clone ID: LIB3167-002-Q1-K1-H9
gtctttgttacaaccatgaaatgagtcctatgcagtcatactgtgatgactacttcaaactcacatacccctgtacacctggtgctgagtactatggtcgtggagctattcccattttctggaactacaactatggtgctgttggagaagctttgaagatcgacctactcagccatccagaatacatagagcagaatgccacccttgctttccaggctgctatttggagatggatgacaccaatgaaaaagtcacagccctctgcgcatgatgcctttgtcggcaactggaagcctagcaagaatgatactatggagaatcgtcttcctggatttggcactacaatgaacattctctatggggatggtgtttgtggacaaagtgatgtgga

SEQ ID NO: 49615 - DNA, 366 bp, Glycine max
  unsure at all n locations
  Clone ID: LIB3167-004-P1-K1-A1
cccacgcgtacgtccacgcgtncggagggatttagggtttgggttgttgggtcgtgagtggaatcagcaactatgaatatgatgcggaggttgaagagcattgcttctgggaggacttccatttcttcagatcctggaggggattctaactcaaaaagggccaagtttgaaccagaaactgaagggaaggccgatgagaaaacaaataccattgaaacaatctgcacagatcaggaacaacctatagacacatcaaaagaaacttccaatgtaggcacatccgatgtatctacagtagctagaactgagaagtcaggtttcgatgagcttcctaaagaattaaatgaaatgaaaattagagatgag

SEQ ID NO: 49616 - DNA, 367 bp, Glycine max
  Clone ID: LIB3167-004-P1-K1-A10
gcctaaaaagggcagttgatttgtttattgcatcaccgtacaccttttcagagggttttgtgatcttttccaatggccaccttcatcttaaggtctaacaaagcagtgcatgcctttggttggctttgactgctactgatggttcataagggtgcttcctatgattttgttgttggtggccaaaagggttggagtgttccaaatgaccttctttttcaatcccttcaatcaatgggcagattattgtccgtcttaaaatgtatactccctttgtgttaatctccaatttggccaagactcatggttttatgtaaagagtgtagactatttcttttgcaacatttattctaccatcatacacattttt

SEQ ID NO: 49617 - DNA, 387 bp, Glycine max
  Clone ID: LIB3167-004-P1-K1-A11
cccacgcgtccgggaacgtgcaagatccggtgctctaatctctgcattctgtgatggctccaaaaccgataacgagtcccgtccccgattcgtggtaccccacgctctccgtcttcaccctcgccatcggcctcgtcttaaccgcctctttcttcatttatgaagcaacatcttctaggaaaagtcgttcacttgttcaggagctgacaactggtgcagtggcttcagtcttcttgggttttgggtccttgttcctcctacttgcttctggtgtttatgtctaatttaaacattgaattggatgaaaattttgctaagcagatagctttaaatgaaaaattgcattggacgttttagtttgatatccgactctaaggtatgttctta

SEQ ID NO: 49618 - DNA, 288 bp, Glycine max
  Clone ID: LIB3167-004-P1-K1-A12
ttctactctactgcttaactttctgctctagaaaattcagtggtgatacatggcttcggctactctctctgtagccaaaccagcccttcaggcaaatgggaaaggcttctctgaattctctggcctccgcagctcatcaggcttccttcccttttctagaaaatcttcagaggatttccattctgtcattgccttccagacctatgcagttggaagcagtggaggatacaagaagggtgtgacagaagcaaaactgaaagttgccataaacggatttggaaggattgg

SEQ ID NO: 49619 - DNA, 368 bp, Glycine max
  Clone ID: LIB3167-004-P1-K1-A2
cgcatgcggtccgacttgttcaacatctgcgattgttttctcaagctcctcgactctcgcctcatgcgctatgcttgcttcggcgattccaaggtcttctacctcaagatgaagggagattgccacaggttccttgccgagttcaagaccggcgcctagcgtaaggaggctgccgagagcactctctctgcatacaaagccgctcaggacattgcaaatgccgaactgcctccaactcatccaattaggcttggccttgcacttaactttatctgtatttgactacgaaatccttaactttcccgatcgtgcctgcaaccttgcaaaacaggctattgatgaaactattgctgaattggattcacttg

SEQ ID NO: 49620 - DNA, 365 bp, Glycine max
  Clone ID: LIB3167-004-P1-K1-A3
cccaccacgtacgctttgttattacttgtttacaaagacgaaatttgccagttccaccgaactagacgaaaccaaaatggcggcagcctcagccgcatacaagatatcaacaccagccttatttccaaccatgcaaaagcaccatcatctgaagccatccaacgtgtgcattacaaggacttagacccctcgcacggttcaccaaagcctcatgaaccaaagtgagcaccaccaccaaaagggttattccaaagggcggtgttagagctgaacttaactcaacccttgtgataagcctcatcactggccttaccctcttttagagaggggatgagttcctcaacttccaaagggggaacttggca

SEQ ID NO: 49621 - DNA, 389 bp, Glycine max
  Clone ID: LIB3167-004-P1-K1-A4
accatgctcttggtactttctccttataatttactcatccactgcgaggcaatcattaatatggagaactcaagcgaaaaatgcaattttgaagggaacaaagagttgaatgcttcaaccattactgttggaggaatctatgacatgttgttggacagcatcaaccatgaagacaccagatccgttgttcgtcttggtcgtgtagatcccactgataacccattgtttcggactaccactgtggctgttgatgctattacaagagccgttcattcctttaacttcaactgttaccctcccactgttggcttacctgaagctaagagggctgttgcagaccatcttaactctaatctttcacacaagatcatatcaccagagaaacgttt

SEQ ID NO: 49622 - DNA, 392 bp, Glycine max
  Clone ID: LIB3167-004-P1-K1-A5
gctcctgctccatggtagccttccattttctttcctttttttttggtatttctgtatgagatatccttttaccgcaggtcctatcaatttcttgtgcttatccttattcaacaaaaaaacaagagtaatctctaagcattattgcatatcagccaactaatcatttcagaacaaaaagcatgtagcttgcaagtccattctggccaagaagatcatcacaaaatgttctctgcatctattttttcaagtaattaaatttttaacaagtttgtcatgcttctgcaggttttctttgcccagctcatgcttgctgacatgaataaagaacttaaaggattaaggtttctattctaatatacaaccatttcttaaacagtggttctaatgactca

SEQ ID NO: 49623 - DNA, 181 bp, Glycine max
  Clone ID: LIB3167-004-P1-K1-A6
aaaaccccccccaccccccccccccccccccccccacccccccccccaccccccccccccctcccccccaccccgccccccccccctcccccccccccaccccccccccccccccccccccccaccccccccatccccccccccaccacccccccccccccccccacccccccgccccccc

SEQ ID NO: 49624 - DNA, 342 bp, Glycine max
  Clone ID: LIB3167-004-P1-K1-A7
cccttgctgaaattgtcacgaccatgttgtcattattcaccaacttgctcctcttcctatccctgctaatcggtctatgcaattgcagggtaacaacaacaaatgaagaggtgcaaaccctaaacacaaacactcacttcaacccacaggtcccacccctccgaaccctctcttcctcgaagcggttcgagggttcctcggagttcgtgaagctcaaataccacatgggacctgtgctatcgtctccgatcaacatctacctcatctggtacggcaagtggccccaatcccagaagctcctcattaaggacttcctcaactcaatcttcgacgaccaccacc

SEQ ID NO: 49625 - DNA, 325 bp, Glycine max
  Clone ID: LIB3167-004-P1-K1-A8
ctctctctctagagcgtcgtcgtttagttagggcagaaaaccccttttcggatcggtggagcgaagcctcgccggcgagacccccgaggctgttcaatcggcgatcgagcaacggcgaaaagcgacgaagatgaaggttttcgtgaagactctcaagggcacgcacttcgaaattgaagtgaacccttcggacacgctttctgaagtgaagaaaaatatagaaactgttcagggtgcagatgtctatcctgctgcacagcaaatgcttattcatcaaggaaaagttctaaaagatggtactactttggaggaaaataaagtagct

SEQ ID NO: 49626 - DNA, 395 bp, Glycine max
  unsure at all n locations
  Clone ID: LIB3167-004-P1-K1-A9
caacatttcaagcatttgatttgcaaattgcaaatccctccaccttttcaaaatcttttgtgatcttttccaatggccaccttcatcttaaggtctaacaaagcagtgcatgcctttggttggctttgtctgctactgatggttcataagggtgcttcctatgattttgttgttggtggccaaaagggttggagtgttccaaatgaccccagtttcaatcccttcaatcaatgggcagaaaaaagccgttttcaaattggagactcccttgtgttcaactaccaatctggccaagactcagtgctctatgtaaagagtgaagactatgccagctgcaacattgattcaccacanacatcatcatcttcttcagcagcacctactggccaagatca

SEQ ID NO: 49627 - DNA, 150 bp, Glycine max
  Clone ID: LIB3167-004-P1-K1-B1
gttgaagtggcagctttgcactcttgcttatattatatttgtaggcatttaagtactcgtgagattaaaatggaccgtgacaaaagaaagacttgacactcttgtgaattagcatttcttgaaatatttccggttgctatttccgtttcc

SEQ ID NO: 49628 - DNA, 121 bp, Glycine max
  Clone ID: LIB3167-004-P1-K1-B10
gggcgagccacgcgttcgaaacttggtagcccacttgcgaatttatattttttgaagggagttccgctgcaggacaaaaacaccgtgttttttccgtgcgggggaaaagaaaagggaagga

SEQ ID NO: 49629 - DNA, 353 bp, Glycine max
  Clone ID: LIB3167-004-P1-K1-B11
cccacgcgtccgcaaccatatctatctattgagaaacatgaagaaggtttcacccttggcattttccattctctttttggccttcaccatagaaccctttattggcattgctgcagcagcaccagaagcagtgcttgacacctcaggccagaagctgagaacaggtgtcaagtactacattctgccagtgttcagaggcaaaggtggaggcctaacagtttcaagcagtggcaacaacacatgccccctctttgtggtgcaagagaagcttgaagtctcaaagggcaccccagttaccttcacaccctacaatgccaaaagtggtgtcatactaacctcaaccgatcttaaca

SEQ ID NO: 49630 - DNA, 202 bp, Glycine max
  Clone ID: LIB3167-004-P1-K1-B12
ctagaccatgtaaccctttattggcattgctgtagctgctccatacgcagtgcttgacaccttatgccagaagctgaaaacaggtgtcaagctctacatttctgccagtgctcacaggcaaaggtggatgcctaacagaataaagcagtggcttcaacacatgccccttattttgttgtgctcgagaagctttgatagtctt

SEQ ID NO: 49631 - DNA, 397 bp, Glycine max
  Clone ID: LIB3167-004-P1-K1-B2
ggaactgttgatggcagtaccgctcaactacgagatgcttgaaagtagttgcttgtactgtatttattgatattgcgttagtgttccgtgtaccgcaccgagccttaataggttgtttgagattctgtaagtaactactccgtgcttcaattggtcaaagtaaatgaaatgaaacgttgatatcaatcactttttatataagaaatcattagcaaaaatcttaagaaaagaaaggtaggtttcttacttatgaaaaggttattggactcttgtgctagaattgcttttttttggggagaaaaatgaaaattatcgtctaattgaatttctttgaaatagtgttgtatatagagaacatcttctatcatatctcatcgcatctttacaggttatagat

SEQ ID NO: 49632 - DNA, 267 bp, Glycine max
  Clone ID: LIB3167-004-P1-K1-B3
ttcgactcttggccagtttatataaacaaactttgggtagataagactgctgaatgtctcatctctaattattgtatttggaaaatagttttgagttgaggatctaatcattaccagatttaatatatctgacacatgctgtctgaaggtgctacgacaccaacgacaccaagttatgtgtccgctctcacgcagcttctgtgcagcacagaggtttatgcccgatacgtgggagccactttcgagctcagcaagtttggatctatt

SEQ ID NO: 49633 - DNA, 347 bp, Glycine max
  Clone ID: LIB3167-004-P1-K1-B4
ggcttttgtgcccttatagcaaatgcatattttatgaagggaatggcttggcttcctgtaaagactcttcagttagaacagacggctgtgatgggtcaggctgagaaaccgtcagttgttgctagcagaatgcgattaatctttagcacacttgaggtagtgagtccacagtggccaagagcatagataatgggatcattttaaaactggctcccaaccatttcacattgagttgtattccatatttgctaacagatgtagcaatatcgtgccagagaggatattaaaaaggaaaagaaaaaactggatttctattttgtatgtatgaaaatgagatacatgatata

SEQ ID NO: 49634 - DNA, 356 bp, Glycine max
  Clone ID: LIB3167-004-P1-K1-B5
aaacgtggaagcacaccccagaccctacaccagtccccgtttgttccgctgcaaaacaaaaacaccgcgtcttccccgtgcggggaaaaagaaaagaaaagaaaagaaccctcaattttccgggaaaaccctccccacaatggtttcccgggaaaacaccaattggctcttcgattacggcttgatcgacgatattcccgttccggacgccaccttcggcgtcaattcctccgccttcacatggccccctaacgccttgaacgcttcctccaatgtcggcgttgaaattgatggcttcgtgggggattctgacagtctcaaagagtctggctcaaagaaaagggttaggtctgagt

SEQ ID NO: 49635 - DNA, 353 bp, Glycine max
  Clone ID: LIB3167-004-P1-K1-B7
cccacgcgtccggaggattggcagttgaggatccctctgccccacatggtcttcgccttgtgatagaggactacccttatgctgttgatggacttgaaatatgggatgctattaagacatgggtccatgagtatgtctctgtgtattacccaacaaatgcagcaattcaacaagacactgaacttcaagcatggtggaaggaagttgtggagaagggtcatggtgacttaaaagataagccttggtggcctaaactgcagactgtggaggatctcattcaatcctgctctattatcatatggacagctttggctcttcatgcagctgttaattttgggcaatacccttatgga

SEQ ID NO: 49636 - DNA, 373 bp, Glycine max
  Clone ID: LIB3167-004-P1-K1-B8
cctcactttcatttctacatccctggctctgttccgtcgatgacgatggcgtttagggtgcgaaaccctgacctccgctttctcattcttctctctctcttgtccatcacttccgccaaggtcttcttcgaggagcgtttcgatgacggatggggaaatcgttgggttaaatcagattggaaaaaagatgagaacctggctggggagtggaaccacacctctggccaatggaatggagacgctaacgacaaaggtattcaaaccagtgaggattacagattctacgctatttcagctcagtaccctgaattcagcaacaaggataagacactagtcttccaattttctgtccagcatgaacagaagcttgact

SEQ ID NO: 49637 - DNA, 319 bp, Glycine max
  Clone ID: LIB3167-004-P1-K1-B9
gagatggctcttatgtgcgttgctgttctagataggccgtatgcatgggccagaacgtacaaagtcaaaagtgacgaaagatggaagagagcatgactgggcaccatcaaccccggacttagatggactataacttatcatatcaagaaggacaaaaaagcatcacatcaaaggcagcatgatgcacaacaacgctgcattctgatgcagcacgggtatgaatgtcatatacaagggagccacttgcgagctcagcagggaaggagctatagagaacacatattggggaatttgaaattctacgttttacaaccaatgc

SEQ ID NO: 49638 - DNA, 360 bp, Glycine max
  Clone ID: LIB3167-004-P1-K1-C1
aattcttaagaccacatgattgtattgcttggaaagttttgattgggcataattttcatacacaagtaaacctcttgcattagcttatcatttaagccaagtacttttccaccttctctacctcttctacgctcccaatgtacagtggcactcgttgatgaatctctgttggttgaatgtcaagtattctctggtggccatctgacccttttccaccagcctgttctactatgaagctcataggagcacattcatacaggagcctgagtttcccattcttacttttcttgtccctggggtacccataaatgccaccatatagcagtgtcctgtggaagtcttctaccaagctaccaatgt

SEQ ID NO: 49639 - DNA, 336 bp, Glycine max
  Clone ID: LIB3167-004-P1-K1-C10
tgcactcgatcaaacacacaatgttaaataatgtcgggattctcgccattgacgtctacttccctgccggttgcggtcaacaagaagcattggatactcatgatggtaccattcaagggaattattccattggacttggtcaacactgcatgtacattctgtaccgaattaaaagatgtcatctcaatgagtctgacagtggttacttatgttcttgagaagaatgggattgatcctaaacaaatcggccgtcttgaagacgtaagcgagaccgttattgacaaaagcaaatccatcaagacattctatattattcgaagatctgcatcaggaatg

SEQ ID NO: 49640 - DNA, 380 bp, Glycine max
  Clone ID: LIB3167-004-P1-K1-C11
caccatcccacgcaaccccaaccctcttctcgtttcctcacccccaccactctctcgaaaccccaacgtcttcaccttaaccgtgccgcgccgccgcagaaggattcggtttcgggtctcggccgccgcggagcccgatgggccgtcgtggtcgcaatcgctgctgcgcgggtcacggcggttttggggaaagtttggggaaatggtaaagaaggagacgggtctcgacttcgaaaacaggagtgtgaagaaagttggcgagtttgtgaacggagatgaattgcgaaggttggggactgattgggtgtttcggtttgtcgattggaatcgttgggaacggtggaagaatatcaaggattgggaacctaagcgaattggtg

SEQ ID NO: 49641 - DNA, 387 bp, Glycine max
  Clone ID: LIB3167-004-P1-K1-C12
agttgagaactaagaaggagaagcaaatggcttcctcaatgatctcttccccagctgttaccactgtcaaccgtgccggtgccggcatggttgctccattcactggcctcaagtccatggctggcttccccaccagaaagaccaacaatgacattacctccattgctagcaacggtggaagagtgcaatgcatgcaggtgtggccaccagttggcaagaagaagtttgagactctttcctacctgccagaccttgatgatgcacaattggcaaaggaagtagaataccttcttaggaagggatggattccttgcttggaattcgagttggagcacggtttcgtgtaccgtgagcacaacaggtcaccaggatactacgatggacgct

SEQ ID NO: 49642 - DNA, 285 bp, Glycine max
  Clone ID: LIB3167-004-P1-K1-C2
aaaaaaaaatatgttattaaaaaattatatttcacaaaattgggtagcttggaaggggggggttgggcataattttcattcacaataaaacctcttgcattggctcatcattgaagccaagaaatttttcaccttttataccgtttctacgctccgaatgtgcagaggcactcgctgatcaatctctggtggttgtatgttaagtattctttggtggccatctgaccctttttaacaagcgctgtttactatgaagcttatatttagcacattcatgcaggagcc

SEQ ID NO: 49643 - DNA, 420 bp, Glycine max
  unsure at all n locations
  Clone ID: LIB3167-004-P1-K1-C3
acgggtngggaatgaaccgggtcggaccacgcgtccgcccacgcgtccgggccaactattatcaggagattcatgcctgagaaagggtctgctgaatatgatgcgttagctaagaaccctgagaaggagtttttgaagactattactggcaagaaagagaccctcattgaccttacaattatagaaattttatcaaggcacgcatctgatgagttctaccttgggcagagagatggcggtgactactggacttctgatgccgggccattagaggcctttaagaggtttggaaagaatcttgaagagattgaaaagaagcttatagagaagaacaataatgagacattgagaaaccgctatgggccggctaaaatgccttacactttgctctatccttctagtgaggagggattgactttc

SEQ ID NO: 49644 - DNA, 394 bp, Glycine max
  Clone ID: LIB3167-004-P1-K1-C5
gtttctgaattcatttcatgtcacataagcccaaatacaaaggaagctcagtatacagtagatgagtaaataaaatttgtttgctgattgctcaaatctggaagaaagaagaacttacgaaagaattctatcctaaaattctcacagaagtaccaagacgacagaagaagcaaaagttacatgtgaactgtccccaaatgaaactccacttctaaataattactctctataataccacccattgaacaacaactttctcactagctctttgattccgtgttttctgtagaatgtcttcgaatatcaaactggtctacaaactccaaaggactaactgtctcatttctgatcctcttgatcttaggactcaagagaccacggtgcctgaacccat

SEQ ID NO: 49645 - DNA, 391 bp, Glycine max
  unsure at all n locations
  Clone ID: LIB3167-004-P1-K1-C6
gttctttccattgatttcttgcttctatatattacttgcttcttttcttgatcatgtcccttgctggtaaaatcagctctgaaattggtgttcaggcaaccgctgcaaagtggttcaacctcttcacaacacaacttcatcacgttcaaaatcttactgatagaattcatggaaccgagctgcatcatggtgaagactggcatcacaatgagtcggncaagcactggacttataccatagatggcaaggttacaacttgcaaggagagtattgaatccgttgatgaagagaacaaaacaatcaactacaagctcttcgatggagacattgataatcagtttaaggtctttaagctcatctttcaagcgattgataaggaaaatgacagtgc

SEQ ID NO: 49646 - DNA, 392 bp, Glycine max
  Clone ID: LIB3167-004-P1-K1-C7
ctttgccttgatttttgggtcaaataaataaggatgttacattggagtctgtgccattgcttccttccacccaaacccacaacatagacgacatcttcttctgcaacacaacaaccaaaacacccttcacttgttttgtttacttaactcgcacttcctcttctccaatttcgaggtctcaattccggctttgaacagccacaagcacgcattgcttgttcaaggttcaaaccatcattcaagacattcatggaagcagttaatgaaactagacctgtttccttctgatatataagaaaaaggttcacatggtttctacagacaaaagtgcggatcaaaatatcccttctgatgaattgcagcagagagtgagtcctgattgtggtactaca

SEQ ID NO: 49647 - DNA, 366 bp, Glycine max
  Clone ID: LIB3167-004-P1-K1-C8
cccacgcgtccgctggaaactgagcgagatttggcggctaagagttctcaggagtcgcgtactgcgattggaacgttgaaggaggcgtttgaagcggtgactagggagaagagtgagattcaaagccgaaacagtgctctagagacgaaaatcggttatctggaaactgagttgaagcaactcaacgattatacgcggaaggaagaggagattacgcgtgcgaagattctcgaactggaagggaaccttggcattgccatgcagaaggaagaggagatgaaaatggagataagtgctcttctgaaggagaagaaagaggtggaaatgaatgttgaaatgttaacagaagaaaaagatggtgttcgt

SEQ ID NO: 49648 - DNA, 196 bp, Glycine max
  Clone ID: LIB3167-004-P1-K1-C9
taaactctcttaaaacaaaattcttttcaaaccactttccccacactctgtagggtgtcattttttttttggaacaacccccaaaaaagagttatttgaccccttttcagtgtagtgcgctgaccactgaaaacagggggctgggttttgaataaggcacattttggcctgtgtttatgtcaccttaattattttt

SEQ ID NO: 49649 - DNA, 395 bp, Glycine max
  Clone ID: LIB3167-004-P1-K1-D1
catttaggctctcttaaaacaaatgttttttaaaccactttccccacactcttgggggggtcatttttttttttgctctttccccacaaagaggtcttggacccttcttctgtgtagtgcaatggccatggctaaggttttctgtgttctgcttctggcactccttggcattttcatgatcacaacttaggttattgcaacagattctgcttattacttgtatggaaggaattatggacctggtagtcttaagagctcacagtgcccttctttatgctcaagaagatgtagtcattcacattactctcagccctgcatggtcttttgtcaacaattttttaaattgtgcccttttttttctcctgtctctattggaacaagttttttttttcctt

SEQ ID NO: 49650 - DNA, 347 bp, Glycine max
  Clone ID: LIB3167-004-P1-K1-D10
gctataagctagtttatcgtgaggtgaatatgaagttgtttgttttctttgttgctgcagtagttttggtagcatggccatgccatggcgcaggctaccaaaggttccctctccgaatgaaaactggctatggtgagcgttcttcggaggtaaaatgcgcaagttttaggcttgctgtggaagcacacaacatccgagcctttaaaaccattcctgaagagtgcgttgaaccaacaaaggactacattaatggcgaacaatttagatcagactctaaaacagttaaccaacaagctttttttttatgcttgtgaacgctaagtccattacaacgacatatttatatt

SEQ ID NO: 49651 - DNA, 382 bp, Glycine max
  Clone ID: LIB3167-004-P1-K1-D11
ctcgttcttcttcgtcgttatctttttcttttgttgtttgtgtgtttgtttttgctctcacctgaaaatgtcttgctgcggtggtaactgtggttgcggaagcgcctgcaagtgcggcaacggctgcggaggctgcaagatgtacccagacttgagctacaccgagtcaaccaccaccgagaccttggtcatgggagtggcaccagttaaggctcaattcgagagtgctgaaatgggtgttcccgctgagaacgatggctgcaaatgtggagctaactgcacctgcaacccctgcacttgcaagtgaagtgttggagagctaaagcttcaagcagagatggcccttagaaataatgataaaaactatatgtagtttcaaaac

SEQ ID NO: 49652 - DNA, 221 bp, Glycine max
  unsure at all n locations
  Clone ID: LIB3167-004-P1-K1-D3
atcagggtcttgagccaatcctggttgggtagaaacccttttggtctttaagtgaggtcannagttttatgtctnngaattagacccgatcaaattctctacctggcctttcgatccccttttgctgatgcaaaattgctgatgaccttcgggtgcctgggtcaaaggagtattgtgcatattcgtgtacaagcagcgaaatggtaggaaaaggcctgaca

SEQ ID NO: 49653 - DNA, 245 bp, Glycine max
  Clone ID: LIB3167-004-P1-K1-D5
atccggtgacgtcaaacatacggaagaattgtctttcagggaacacggtggagaaaacggttcgcgctcgtagctcgattgagcaagcctatgtatgtcaaagaaacaaagcagactcatctaaagatggcagccaatttgccgttatggacttggatacatatgacgagattcgtctgggtgaaaaggaaattggagacagtaccaaatggcttaaaagaggcatggactgcgatttgctgaac

SEQ ID NO: 49654 - DNA, 334 bp, Glycine max
  Clone ID: LIB3167-004-P1-K1-D7
cgggtcgggaaggaacgggtggaccgacgcatgcgtctctcttagtttatgaccacacaaaaggtcgtggcaaagaccctccgtttcaatcccacaacacactcattgctcattcttccactcccgcacaaaaatggcgtctttgcagcaccccacaagttgcctccaattcaaacacgttctaatcccccgaaacactcttacccagaaacccatcctcaacctcttctcccttccgggcaccaccttcacccccctcaagctcaaattcttcagcggcggtgccgtccgccgctccaccggcgcctctggagccagaatgttagtcaccgca

SEQ ID NO: 49655 - DNA, 239 bp, Glycine max
  Clone ID: LIB3167-004-P1-K1-D8
gaaaaaagcatgaacgtagaaaatttgatgaggcataaaaacaaaaaaggaaagggggggaataacaaaagagagtgattccactactaaaaaataaaaatgaagattctataggttcaccaaagtgatagttgattggttaggtgatgtaaaattgttgtgcttggtaattctttaaaggtttctcggggtggtggcttttgggggtgatccgtttttttctcgtttgggtgatagtt

SEQ ID NO: 49656 - DNA, 390 bp, Glycine max
  Clone ID: LIB3167-004-P1-K1-E1
gaggaatgggttcaccgacatcaaggattgtgttccgtattgtggtggtggcgcttctgcttcttcttctcttctacattggtcgccctctgtattggaaaatctccgccaccgtccacgacatccgcaacaacaagcaaactgtcagacaaggtctttcccaaatcgtcattgaggctcagaaatcggtcggttggtatcacgatgagtccgactcaggggttcgtgctaactaccgaaaactgcttcttcataagcccatttccacagtttttgcttagttatagttagataaatacatgtcactcaagattttctttctgctctttttttttctcctcacgattctgtgatttgcatatctggtttttgtcttatatggacaataat

SEQ ID NO: 49657 - DNA, 369 bp, Glycine max
  Clone ID: LIB3167-004-P1-K1-E10
gcagagggagtagcggcattaaaaatgcatatcttcgtgaaaactctgacagggaagactataaccctcgaggtcgagagcagcgacaccatcgacaatgtcaaggccaagattcaagacaaggaaggcattcctccggatcagcagcgtttgattttcgccggaaagcagcttgaagatggaaggaccctggccgattacaacatccagaaggaatcaacccttcatctcgtcctcaggcttcgtggtggcatcattgagccttccctcatggctttggctcgcaaatacaatcaggacaagatgatttgccgcaagtgctacgcccgtctgcatcctaaggctgtgaacttgccgaagaaaaagtgc

SEQ ID NO: 49658 - DNA, 395 bp, Glycine max
  Clone ID: LIB3167-004-P1-K1-E11
cccacgcgtccgaaaaacacttattgcttctgaactgtgacttctgacatccaaaatctcgtgccagcaaacatggcatccatgaccactatgcttcagaccatggttcccaagaatgcaccgaatctccctcctcgtgttggtgtttccaacaacactactaagatctcatttgctggctcaggtagggtaccgtgcacccggattcagaggaacaggaatagatcttcttccattgtggttgctgcagttggagatgtttcatctgatggcaccacttaccttgttgctggtgccattgctgtggctctcattggaacagccttccccatcttcttctcccgcaaagacacatgccctgaatgtgatggagcagggtttgtgcgtaaggctga

SEQ ID NO: 49659 - DNA, 117 bp, Glycine max
  Clone ID: LIB3167-004-P1-K1-E12
tgaactattgcatactgcccatcttaatctaaaaggattggatgagcttttgaaggaagctcaggcgcatgctgatggcgtaattccaaaataatatcgcatttaatcgaaacacaa

SEQ ID NO: 49660 - DNA, 372 bp, Glycine max
  Clone ID: LIB3167-004-P1-K1-E2
gaaaactggttcttcttttcgcgttgcgttttcttggtgtctctgtcgattctgcttctgaattttaatacttaggaagtttagttttctctcttggcttctccggttggagtttccggcgaccttgtcggagattttgttgtttatttttcacaccacttgtgaaacttctcaagaaaaagaaaaaggatgtttcttgttgattggttctatggaattttggcgacccttggcctgtggcaaaaggaggcgaagattttgttcctagggttagataattctgggaagaccactttgcttcacatgctcaaagacgagagacttgttcagcatcaacctactcaatatcccacttcggaggagttgagtatt

SEQ ID NO: 49661 - DNA, 377 bp, Glycine max
  Clone ID: LIB3167-004-P1-K1-E3
cggacgcgtccgcccacgcgtccgtccatgcttccggataaggggcagctgtactatgtgtatgagattgatggtgttggcactcatagcttgatctcagtgacttgtgctaagaacaagctctatgcacattttgtcaatgctcctactcctgagtggaacagagataaggacgtgttgaggcatgttcatgagtcttttaagactgtggggtctttttagttggcttgtggtgttttgtattttgtagaggtaatggatgattatctattatgaggatgaggatggtttcttttgatgataaaatttaagtttttcctacttgtctgcttgattcaatttttggcatagttagcttcaatttggaactggtttaa

SEQ ID NO: 49662 - DNA, 390 bp, Glycine max
  Clone ID: LIB3167-004-P1-K1-E4
cccacgcgtccgcccacgcgtccgttttcttgttttctctctcaccctcatatgcatcatcttccacacccatggagcgttctctgagcaatcaataatcaagttacccacagaccaaccaagggtagagaaactgacccacttgcattttttctaccacgacatcttagagggcaagaacatcacggtggtgaaaatcatcgagccatcagcgagcgaggttcgtgaagcaactgggtttggaaccactttcatgatggacaatgttttgaccgagggtccagagctgagctcgaagcacgttgggagggctcaggggctgtttggcttggcctctttggaggaccgtggaatggtgatgctcattaacttggctttcagtgagggtga

SEQ ID NO: 49663 - DNA, 386 bp, Glycine max
  Clone ID: LIB3167-004-P1-K1-E6
gcgaaaaggaaaaaaaggcaaaatgggtaaggatctgagcgatgagcaagtgtctacaatgaaggaagctttctctttattcgacacagacggtgacggtcggatcgcgccgtcagagctggggatcctgatgaggtctctgggagggaacccgactcaggcccaactcaaagccatcgtggccgaagagaacctcacggctcccttcgacttcccccgattcctcgatcttatggccaaacacatgaaacccgaacccttcgatcgccaactccgcgacgccttcaaggtcctcgacaaggactccaccggcttcgtcgccgtctccgagctccgccacatcctcaccaacatcggcgagaagctcgagccctccgagttcgacg

SEQ ID NO: 49664 - DNA, 367 bp, Glycine max
  Clone ID: LIB3167-004-P1-K1-E7
gtaatttctattctgatgcgagcgaggcaagggaagcaagcaagacgatgggtatagtatgactaatgagattgagagtgtatagtgatattcctgaatcctgattctttcattttccatagattagcgagcgagagagagagagaatggttcgggaagtatcagagagttgcgttgatagcttgttgacggagatggtggcgtgctattgcaatcgattctatgccaacaagcctgaactcgccgcacgcaggatcgaggccattggatatcaggtcggtcaccagctctctgaaaggtataccatggagcggcctcggttcacggatcatctcgaggccatcaagttcatctgcaaggatttttg

SEQ ID NO: 49665 - DNA, 389 bp, Glycine max
  Clone ID: LIB3167-004-P1-K1-E9
cccacgcgtccggtgaacaacgattggagcaagcttggatagctataaaaaaggtgtggggctctaagtggaatgaaagagcatacttcagcacaagaaaagtgaaactcgaccacgaatatctttccatggcagtccttgttcaagaagtgataaatgctgactatgcttttgtcatccacacaactaaccctgcctctggagattcatcggaaatatatgctgaggtggtaaagggacttggagaaacactggttggagcttatccaggtcgtgctttgagttttatctgcaagaaacgtgatttgaactctcctcaggtcttagggtattctagcaaacctgtcggcctatttataagacggtcaattatttttttgatctgattt

SEQ ID NO: 49666 - DNA, 363 bp, Glycine max
  Clone ID: LIB3167-004-P1-K1-F1
gtggtgtttcatttgtgaaactaacaacaacacaaggccatcatcatggcagctgctgtccccaatggcaagccaactcaagtccaccttcactaggactcttgtagctcccaagggcctctctgcctcttcaccacttcacctcgtgccttctagaaggcaatttagcttcactgttaaggccatccaatcagagaagccaacctatcaagtgattcagccaatcaacggtgacccattcattggaagcctggaaaccccagttacatccagccctttgatcgcatggtacttgtccaacctgcccgcatacagaaccgcagtgagcccactactaagagggatcgaggtgggcctggccca

SEQ ID NO: 49667 - DNA, 291 bp, Glycine max
  unsure at all n locations
  Clone ID: LIB3167-004-P1-K1-F10
cccacgcgtccgacagaatatcagctgaatttttggatggatttctacaaattgtagttcctaaagtttgagtatgactgagcaatattgatttgtagcacatatatgtatacgtatacctataccccgtgcatatagatggagaagaaatgggcattgttctgcatgggccatgtcatgccctacatatatttgtaatgtaatgagcagatgatgggttaattttgatttcatatacaacttaattgttgtgcagcncaagaaaagaaacaagcaaaaaaaccttaaagg

SEQ ID NO: 49668 - DNA, 398 bp, Glycine max
  Clone ID: LIB3167-004-P1-K1-F12
gccacgcgtgcgtcgagataactagaaacagtgtgatgaaaatgaaggtccttgatttcttcgctgctacaattttggtagcatggcaatgccatgcgtacgatatgttccctctccgaatgaacactggctatggtgcccgcactccggaggtgaaatgcgcaagttggaggcttgctgtggaagcacacaacatctttggctttgagaccattactgaagagggcgttgaagcaacacaggcatacatccatggcgaacaatatagatcagactctcaaacagtttaccaacaagcttacttctatgccagagacctggaagtacatcccaaggacacatttgtgttcagtatagatggcaccgtgctttttaatattccatactacaaaaaacat

SEQ ID NO: 49669 - DNA, 396 bp, Glycine max
  Clone ID: LIB3167-004-P1-K1-F2
ctctgagactcagcagtaataggaactaccaagtaaccatgtcccgtcatcgccggcaaccctcccaagcccttccgtcggacctattcgccgccgacgaactcactaagccctttgacttcacgcaaatcatcaccgaagaaaccggaaccgccgccgctgccgccgccaccgtttcccgctcccaagagatcaaagactcccctctcgccgccacttctccgcccaagaagaaggtgccgccggcaaccaaatcggcttgaaccgccgtatgcatcatgatgagtctgctcctgctgctgcattttatgtctgtcattttctgtttttctttttctttcttttctttttggttgaaataaaaaatgttaagatgacagcagagaaaagctcaag

SEQ ID NO: 49670 - DNA, 384 bp, Glycine max
  unsure at all n locations
  Clone ID: LIB3167-004-P1-K1-F3
cccacgcgttcgnccacgcgtccgatcgcgagcggacacaacaatctcaatgccgaattggttcttctcggggacatgggtgctgggaaatccagcctcgttttgcgctttgtcaagggtcaatttctcgaatttcaggaatcaacaataggggcagcgttcttttcacagacgctggcagttaatgacgcgacggtgaagtttgagatatgggacacagcacgacaagagaggtgccatagcttggctcccatgtattacagacgtgctgctgctgctatcattgtctatgacatcactagctcggactcctttacccgagctaagaagtgggtccaagagctttaaaaggcagggaatcctaatgtggtcatggctcttgct

SEQ ID NO: 49671 - DNA, 251 bp, Glycine max
  Clone ID: LIB3167-004-P1-K1-F4
tcggccaacgcgtccggctggttaaagatctcaaaaagagctttgattcaggcatgactaaaactattgatggagggttttccagttggaagccatagctaagatgttagaagagaaagagaaggaaattactgaagctctatataaggaccttggaaaacctcgacttgaagcatttataaccgagatttcccaggctaaatcctcatgtagtgaagcacttaaagagctgaaagaatggatgaagcctg

SEQ ID NO: 49672 - DNA, 352 bp, Glycine max
  Clone ID: LIB3167-004-P1-K1-F5
ctcactctctcgtctgtgcaaccatacgtttatctcccggccctgttcccctctgggattcgtcatgaaaggaggaaagttcacgaccgaatctaatagagccgatcccaaacttgctgtgaataagaagggagccgacaccaaggctaggaaacccgcctgcaaggggaaggcagggaaagaccctaacaagccaaagaggcctccaagcgctttcttcgttttcatggaggagttcaggaaggtattcaacaaagaacatcctgaaaacaaagcagtgtctgctgtgggcaaagctgctggagcaaaatggaagaccatgtctgatgcttaaaaagcaccttatgtggca

SEQ ID NO: 49673 - DNA, 321 bp, Glycine max
  Clone ID: LIB3167-004-P1-K1-F7
gaggaacagaactgaactgagacttgcatgggaaacactggatcacctacgctgaaatcgtctcgtcttcattccttttttttccggtttagagaattgaaaagatttcattgataattgagcaaacacaatgagtgctccgcctcatcatgatgatgaccacgacaacgaacaagtttttcttgatgagtctgacatcatccatgaagctgccatggataatgaagatcttcctgaccctcatgatgattctgaactcctcgacgaggctcaggatagtgattttgtgcacaaattcactgctcataccggggagttgta

SEQ ID NO: 49674 - DNA, 291 bp, Glycine max
  Clone ID: LIB3167-004-P1-K1-F8
aggttctctaacggttatgagtgttataggctcttggaattgtcataaagtggagactgtccgggatgaatcagctaatttaccctcaaacttgggcattcactctagttgtaattgtttgtgttcttacccaaatgaatcatttaaataaggcactggatacttctaatacggcagtggtatctaccatatattatgtcatgttcactacatttaccattgtggctagtggtattatgtttaaggactgggattgacacagtccaacacatgttattacagatgtttgtg

SEQ ID NO: 49675 - DNA, 378 bp, Glycine max
  Clone ID: LIB3167-004-P1-K1-F9
cccacgcgtccgctctatattccattgccacccagttttgaatatatttttattccttctttgtttcttcactttcttccatacacataaccatgtcttctcagactgttgtcctcaaagttggtatgtcatgtcaagggtgtgctggagcagtgaacagggttttgggaaaaatggaaggtgttgagtcatttgacattgatctgaaggagcagaaggtgacagtgaaaggaaatgtggagccagatgaagttctgcaagccgtttccaaatctgggaagaagactgcattctgggtggatgaagcaccacaatctaaaaacaagcctttagaaagtgcacctgttgcctcagaaaacaaggctttagaagctgcaa

SEQ ID NO: 49676 - DNA, 313 bp, Glycine max
  Clone ID: LIB3167-004-P1-K1-G1
tcgcacaaacacaaggatgataccgcaacagttggcttctccatgtggacaccaatgcaccaataaatacgctgccctaaccaaaatcccatggcgagtattctgcaaaaagggttgcgactcatatggagagacatgggaagaatgtttggaggactgcaatcaaatatgctacaaggatcccgtactaaaggaccagcagtggagtgcttatattgatcgttcccctggagctgccagttattcagaggaatgttttcatgcatgtgtatctggctgcggttacaagtttgaggtttaatcagaggaagct

SEQ ID NO: 49677 - DNA, 365 bp, Glycine max
  Clone ID: LIB3167-004-P1-K1-G10
cccacgcgtccggctcaaaacatttccgatgcggaggagggaaccttggagattggaatggaatacagaactgtttctggagttgctgggccattggtcattcttgataaagttaagggacccaagtttcaagagattgttaacattcgcttaggagatggtactactcggcgtggacaagtgctagaagttgatggtgaaaaggctgttgttcaggtctttgagggtacatctgggattgacaataaatttacaactgtgcaatttactggagaggtgttaaaaactccagtatcattggacatgcttggccgcatattcaatggttctggaaaaccaattgataatggtccacccattttacc

SEQ ID NO: 49678 - DNA, 56 bp, Glycine max
  Clone ID: LIB3167-004-P1-K1-G11
cggacgcgtgggaaaaaaatttttttaaaaaaaaaaaaaaaaaaaataagggaggg

SEQ ID NO: 49679 - DNA, 149 bp, Glycine max
  Clone ID: LIB3167-004-P1-K1-G12
ggtctggactgagctaacataccgactatgggaaccatcaccatgctcgggaactgtctattgactgtccacctgacccctaacgatcttaaagggctgtccttaggagaatactgataatctgtgctgccacatctggaggactaaag

SEQ ID NO: 49680 - DNA, 386 bp, Glycine max
  Clone ID: LIB3167-004-P1-K1-G2
actattcttcttcgcagcaatggctcgagtggatctggacgggaaccccatgaaggcacttacgatctgcatgatcggcgctggcggcttcataggctcgcatctctgcgagaagctcatgtccgaaacccctcacaccgtgctcgccctcgacgtctacaacgacaagatcaaacaccttctcgaaccctccgattccccctgggccggccgcatcaccttccaccgcctcaacatcaaacacgactctcgcctcgaaggcctcatcaagatggcagatctcactattaatctggctgccatttgcactcccgcggattacaacacccgccctctcgacaccatttacagcaatttcatcgacgcgctccccgtggtgaaatact

SEQ ID NO: 49681 - DNA, 257 bp, Glycine max
  Clone ID: LIB3167-004-P1-K1-G3
acccttccgggaaaagctggtgtatttcacatcaatatttcctcaccattttaacactttgcttaattaaaaaaaaagaaaagaaaaggaagtgtgaattgaaatctatgtttttcatattttattataaaaaggaagctatgtaagaatgctctcaaaacaattgtatgtaaataacattattgatgtaacccgaatatgaatctaaaaatgtcagatttgcatgtctatttatataataacatgattgtaccgcc

SEQ ID NO: 49682 - DNA, 263 bp, Glycine max
  Clone ID: LIB3167-004-P1-K1-G4
agcacgcgaacgaaaaaacgttgttcgtgatggcacgtacgaagcaaactgctcggaagctcacatgaggaaaggcacctatgaagcatctcgtatccaaaggtgcaacgtaagtcatgcaccaactactgtttgtgggaacaacacacaattgagtggaacatgcaccaaagctcttcactagatcagtgaataccatgagagtaccgaaccgttgaacacatagcttgatttccagaagctagttccagaaaccgctgatg

SEQ ID NO: 49683 - DNA, 330 bp, Glycine max
  Clone ID: LIB3167-004-P1-K1-G5
atctctctctctccaatggccaaagacctcgaaacggagattcaaagtgggttgcgctgacaaggactaccacgacccaccccccgccccattctacgaccccgccgagctccgaaagtggtgcttcttccgagccctcatagccgagttcgtcgccaccctcctctttctctacgtcaccatcctcaccgtcatcggctacaaccaccagacagccaccgccgccgagccctgcagcggcgttggcgtcctcggcatcgattgggcctttggaggcatgatttttgtgctcgtctattggaccgccggcatatcagggggacacataaa

SEQ ID NO: 49684 - DNA, 394 bp, Glycine max
  Clone ID: LIB3167-004-P1-K1-G6
cccacgcgtccgacatgcaaggtgtgtggacaggctcagccacaatcttaccaaatggtgaaatcatcatgttatacacaggttccaccaacgagtcagtgcaggttcaaaaccttgcataccctgcaaacccctctgaccctctccttgtggattggatcaaataccctgggaaccccgttttggtgccaccaccaggcattggggccaaggactttcgtgacccaacaacagcgtggctcacctcagaagggaagtggcgaatcaccataggttccaagctcaacaaaaccggcattgcgttggtttatgacactgaggacttcaagaacgatgagctcaaggaggggctgcttcgtgctgtcgctggcacccgcatgtgggagtgtgtgga

SEQ ID NO: 49685 - DNA, 266 bp, Glycine max
  Clone ID: LIB3167-004-P1-K1-G7
ttgacgcgtgggcaggaatttcactgggcgattctccggtcgtcggccggcgggactattaaattggcgtgggcggataacgatgaccggtactacactactaggggtttcggctgatgagaacggcttatgtcaccggcgactgcaactactgtgaggaacgtgccctagtttggcccaagctctacattactatttcatgctaggtgtaagaggtattcttttcttgcctatgaagtttttattagattttttcttttttctct

SEQ ID NO: 49686 - DNA, 348 bp, Glycine max
  Clone ID: LIB3167-004-P1-K1-G8
cccacgcgtccgggcttccttaagctccttagtgctgctccttgcagctctaatgctatcccctcaagttcttgcaaactatgagaatcccccagtgtacaagcctcccactgagaaaccaccagtttataagcccccagttgagaagcctcctgtttacaaacctccagttgaaaaccccccaatttataagcctccagtagagaagccaccagtgtacaagcccccagttgagaaacccccagtttataagcccccagttgagaaaccaccagcgtacaagcccccagttgaaaaaccaccagtgtacaagcccccagttgaaaaacccccagtgtacaagccccc

SEQ ID NO: 49687 - DNA, 390 bp, Glycine max
  Clone ID: LIB3167-004-P1-K1-G9
cccacgcgtccgctggtttttgtgtcgtggttgttgttttcgcgatcaaaacgatgtcttcgccggacattgtctcgatattggagaactcgaaggagttcgatcgggtgaggaaagaacaagaggatattctgtcggagatcaacaaacttcacaagaagcttcaagcaactcctgaagtagttgagaagcctggggataactcattggctaggctgaaatttttgtacactcaagcaaaagatctttcagaaagtgaagcaagtatttccaacttactgataaaccaaattgatgccctactgcctacgggtccacaagggcaaacacgaaagagaataggaaaaggtaatgagcagaaaaggaaacgagtgaagacttgatcagaca

SEQ ID NO: 49688 - DNA, 390 bp, Glycine max
  unsure at all n locations
  Clone ID: LIB3167-004-P1-K1-H1
atgattgagaggtccacanaccttgactggtacaagggtccaactctgcttgatgcacttgaccagattagtgagcccaagaggccctctgacaagcccctcaggcttccccttcaggatgtgtacaagattggaggtattggaactgtgccagtgggacgtgttgagaccggtgtcttgaagcctggaatggtggtgacttttgcaccaactggactgacaactgaagtcaagtctgtggagatgcaccatgaatctcttacagaggcacatcctggtgacaatgtgggattcaatgttaagaatgttgctgttaaggatttgaagcgtggttatgttgcctcaaactcaaaggatgaccctgcaaaggaggctgttaactttacagcc

SEQ ID NO: 49689 - DNA, 302 bp, Glycine max
  Clone ID: LIB3167-004-P1-K1-H10
tatttctgcacgaaatcgtcccaattttgtgcgattgctcaattttgctcaggatgttaattttgccatggaagccgcaaggaaatcacggaatgcttttgcagctgctaattcaagcctggctgtggacaagaatgcagatggtatctcctctatcaagaaggctcttgattttagctttcaagatgtggaggagttactacgtttggtaaaagttgctgtggaggccattaatcgttaaaggatccatttaatcaaaagatgatcctagcccgttaagaacatgtgtttcttggtcatgt

SEQ ID NO: 49690 - DNA, 245 bp, Glycine max
  Clone ID: LIB3167-004-P1-K1-H11
ctctctctctctctacaatggccttagccgcagcccccacaactttctctgtggtgcactccaccaccccggcctcctcctcctccgccacctccgcctccccctcgcgcgtgcagctctcctcctccctccgctcgcgcccgctcgcgcgccgccttggcttcgccgcagcggacccgctgctcgcggcgaatgtcgcagcgcgcgtcgcatcggtgagaggaggaaagggcgcgaggggggtg

SEQ ID NO: 49691 - DNA, 214 bp, Glycine max
  Clone ID: LIB3167-004-P1-K1-H12
aaaaaaaaactccaaacccctaattcctctttgaaagtgccacgacggatttgatagtggttttaaaccctagctagggtgttagtgtactatagatacaaaacgagaacgacgagtgactaatacagatcaaggatgagtttggtagcgggttatacaagaaataatttggggcttcaccctttattctaattccaaaaccttaaaccttttt

SEQ ID NO: 49692 - DNA, 397 bp, Glycine max
  Clone ID: LIB3167-004-P1-K1-H2
aagaagtatcactcatataatactcttgtatcatttcatttcgataatcatccatagctactgaagaaaatggcaaccatctctgctgctatcacaaccccatcgatctcccgcgcaactcttgtgcaaaagcgggtctcatctcccgttcttggtttgccagcaatgggtaaggtgggaagagtgagttgctccatggaggaaaaaccttattctgtgaaggaaagcagctctagcatgttggggatgggggcatctctgatggcagctgccagcgctgcagccatgtcaggcccagccatggccctggtagatgagagactgagcactgaaggaaccggacttccctttggcctcagcaacaatcttcttggttggatccttttccgcgtctttg

SEQ ID NO: 49693 - DNA, 312 bp, Glycine max
  Clone ID: LIB3167-004-P1-K1-H3
ggattttatactatatattatctaagagtccccttatatttcaacatctttaaaggtcaactattccattaacactcttaaatttttccaaatttatatatgttatttttgagaatatttaaaatagggggttttttttataaaagatgtgtaatttggtatgtttacagaaatgaggccacttgtgctttatataacagaaggagaggtttttttcttatggaacgaaaaatttcagtgtgcaaagtgggacctgctatactgatatgaccacccattgtaacaagaccaagtgcccgcaaagcttgttta

SEQ ID NO: 49694 - DNA, 379 bp, Glycine max
  Clone ID: LIB3167-004-P1-K1-H4
atgaattcaaggacaatgtagagaagctggttgataaagctcacattcactatgaaaatctctctctgtcatcagcttgtgaggctgttctggagattggtaatgttgggaatttgtatatggatcagcgtgcaccatggtctctctttaagcaagggggcactgctgctgaagcagctgctaaggaccttgtaattatattagagacagtgaggattattgcaattgcactctttcctgttacaccaagcttgagttggagaatatatgcacaacttggctattccagggaccaatttgatgcagcaacctggagagacaccaagtggggtgggcttaagggtggccaagtcatggctcaacctaaaccagtctttgc

SEQ ID NO: 49695 - DNA, 390 bp, Glycine max
  Clone ID: LIB3167-004-P1-K1-H5
gaaaaaccattgtatgcttttgagtttactatcaccatcaccactggtttccaccatgtcagagaagaagaagaagaagaatagcacgagaaggagcgttgttgttgttggggagagcaaaaagccacaacctttggtggaagtggaagacatagaggactcactttccttctccaaagacgagactcacaaactgagagtggctcttttggactggtacgacctcaaccgaagggaccttccttggagaaccacattcaaacaagaagatgaagaagtggaaagaagagcttatggggtgtgggtctcggaggttatgctgcagcaaacaagggttcagactgttattgcctattacaacccgtggatgcaaaaatggcccaccattta

SEQ ID NO: 49696 - DNA, 336 bp, Glycine max
  Clone ID: LIB3167-004-P1-K1-H7
gagagacagcattgcttgaagttggaagaggggagaaagatttggaaatggctgctaaagtagatgctaatggtggtggtggtaagggtggggtttctgcagtttctgccaaggttccagcagtggcacatccattggctgaaaagcctgatgaggttgcatccaatattagttaccatgctcagttcagtcctcatttttcccctttcaagtttgagctggaacaagcttactatgccactgcaaagagtgttcgtgaccgtctgattcggcaatggaatgaaacgtaccttcattttcacaaaattgatcccaaaccaacttactacttatcga

SEQ ID NO: 49697 - DNA, 344 bp, Glycine max
  Clone ID: LIB3167-004-P1-K1-H8
cccacgcgtccgatctgatgttaacatagaaaaggagcaagatgaagaatttcgctttcctgttgaccatcttatcgtgagaggcgggaacagaaggctaatgcaggacatagattgtggaggattgtgcaagacaaggtgcagtgcccattcaaggccaaatgtgtgcaacagggcttgtggcacatgttgtgtgaggtgcaagtgtgttccacctggaacttccggcaacagggagctttgtgggacctgctatactgatatgaccacccatggtaacaagaccaagtgcccgtaaagcccatagaaggtgagccctatccaattgggcccttcacacacct

SEQ ID NO: 49698 - DNA, 360 bp, Glycine max
  Clone ID: LIB3167-004-P1-K1-H9
gaatttctatctatctcttgtttcaatttcaacaacggttactcctttttcgttttgagtttcaatcaagccatcatcatgtctaccgcatcgcaacccaaggccaagaaaacggcgtcgtccaagaagcccctctcccaccctcccttcgccgtgatgatagcagaggcgattgcgagtctgaaagagagaaccggttcgagccaatacgcgataaccaaatacatcgaagggaagcacaaggagttgcctgcaacctacaagaagcttgtcctcgttcatctcaagaaatctgttgctgctggcaagcttgttaaggtgaaaaactcctttaagctcgcaccgactaagcctgctccg

SEQ ID NO: 49699 - DNA, 144 bp, Glycine max
  Clone ID: LIB3167-010-P1-K1-A1
gcaaacccaaaaccttttgccatttatgccttcaccaaagaatgaacctttcaagagaaagattctatcaaaaacatcctaaggaagtgtcgtatttaatgacacaatgttaagtaggctttatttctgtctcctactacttct

SEQ ID NO: 49700 - DNA, 382 bp, Glycine max
  Clone ID: LIB3167-010-P1-K1-A10
cccacgcgtccgatcagggcgactgatgagctgctgctgcgctagaaagtatgggtagcaaaggatctggtctaggaaaggggacacatgtaaagaacaataccaactgcgtacttaacttacgtgatgaagtgggtattggagggcttgaaaatcattcttatattttggagcaactaattactgttggtgcacttaggggtgcagaagtccaaggaggattcgagaaattgattgcactggcaagagcaagacgggaccctcaaactgtggatggagcctatatctcggcttgtctttgcaacagacaggaccttacaagatggaaatctgcatcttacacctccagtaaacctcaccaatgcaccgatgtctctagtcg

SEQ ID NO: 49701 - DNA, 378 bp, Glycine max
  Clone ID: LIB3167-010-P1-K1-A12
ggatgaatgaatgaatgtcccttcatgctaactagaaaactttcacgtgatgtgttccccatcaatgttgttggtgtgggggcaccctgacacagtgatgggggttggagggtaggaacttcacaagtggattaatgcttgaaaataggttggagatttttttttttatgctttcaaggtgaagaaaattggttatatcttgggggttggattgggattttgggatttgatgatttcttcagattacacttttttttaacataaaaattattctcaatgattttttattttgttgggtggaataaggggacaaagcatcgtggttttgtattgggtatgcatgggagctgtcagagaattatttttctcctttttttt

SEQ ID NO: 49702 - DNA, 381 bp, Glycine max
  Clone ID: LIB3167-010-P1-K1-A3
cccacgcgtccgctttctttgtttctgtgtgttcgagattgaagaagatgatgcaggctggacccggcggcatggcccaacaagcgaaccaacaatacgcacagcaacagcaacaaccctacatgatgatgccgccgcagcctcagccccctcagatgtgggccacatcggcccagcctccgtcccagtcggtggctcctccgcaacccaccagcgccgatgaggtccgtaccctctggatcggtgatttgcagtactggatggacgaaaattatctctacacctgtttggcacacaccggcgaggtggcttcagttaaagtcattcggaacaaacaaactagtcaatcggagggatatgggtttattgagtttactagtc

SEQ ID NO: 49703 - DNA, 382 bp, Glycine max
  Clone ID: LIB3167-010-P1-K1-A4
cccacgcgtccggtttgatttcattcttgtttgattggcaacttgtgttgttcccaatccaagagttatgggatgggcctctgttgtccacaacggcgtccgaattccattcaacttggagcacattcacactcctcctttcagatgctctgcacttcaccaccccatctcttccttttgctcagtgtaccattatcgtcctcctcaccgcttcccacttctgtgctccagacgaattggccaccacaattatgcctcagaagtaaagaggattagtgctcaacaaaatgatgacataggcaaagttgagaaatctcccactcaggaatctctggcaaatgaagattacagttcctccgttagaactgtagcattatgggtg

SEQ ID NO: 49704 - DNA, 383 bp, Glycine max
  Clone ID: LIB3167-010-P1-K1-A5
cacgcgtccgcccactcttccggtttgatttcattcgtgcttgattgacaacttgtgttgttcccgagccaatagttatgggattggcctctgttgtccacaacggcgtccgaattccattcaacttggagcacattcacactcctcctttcatatgctctgcacttcaccaccccatctcttccttttgctcattgttccattatcgtcctcctcaccgctttccacttctgtgctccacacgatttgtccaccacaattattcctcataagtaaatattcttatttctcatcttaatgatgacatacgcaatgttgaaaattcttccactcatgaatttctttcaaataaaaatttcacttcccccttttgatctgtatct

SEQ ID NO: 49705 - DNA, 99 bp, Glycine max
  Clone ID: LIB3167-010-P1-K1-A6
ttatcacataaaaataggataaaaatttttagagctttgatatatattatgcctgagaaatgaggtattataagtatttgctttaaataagacaatgca

SEQ ID NO: 49706 - DNA, 381 bp, Glycine max
  Clone ID: LIB3167-010-P1-K1-A7
gtgaaatcggaagacggtgaccgtcttcccgttaccttgcgcgggccgaagacgccgacgccgatcacctaccgcgtgccgatggcctccgcacaggtgaagtccgccgtgctgctcgccggcctcaacacgcccggcatcacgacggtcatcgagccgatcatgacgcgcgatcatacggaaaagatgctgcagggctttggcgccaaccttaccgtcgagacggatgcggacggcgtgcgcaccatccgcctggaaggccgcggcaagctcaccggccaagtcatcgacgtgccgggcgacccgtcctcgacggccttcccgctggttgcggccctgcttgttccgggctccgacgtcaccatcctcaacgtgctgatg

SEQ ID NO: 49707 - DNA, 374 bp, Glycine max
  Clone ID: LIB3167-010-P1-K1-A8
gttgcattgtaaaatgaacaatgatttgttccactatgagattgattcctatcttgtgtttgaacacagtgcaaatgcattccaagttccagatgaaaaaaacatagtatttttctccagttggtattatcacattggagagaggtaccaattccctcatcatttatattgacattgacggtgccactgctgaggatctgagttcaaaatgatttgttccattcggggctgcaaaagtggatataacaaagtatagagggaaaaagtttcaatgccttgacccaaaaatacttgtaacaaccacataagacaagggaagaattgcattttttttcattgcttgtatgatgctctataatggatgcatcatctta

SEQ ID NO: 49708 - DNA, 382 bp, Glycine max
  Clone ID: LIB3167-010-P1-K1-A9
cccacgcgtccgcccacgcgtccgaagaaatttaagtgaggagctagagaatgatgatgaagtctgctatgtgtgcagtggtggttgtagcacttcttcttctggcggaggtggggcccatggctgaggctgtgacatgcaccccaacagagttgagtccgtgtcttccagcaatcacttccggtgctaaaccttccaatgcttgttgcacgaagctgaagcagcaaaaaccatgcttatgtggctacctcaaaaacgctagcttgaagcagtatgttaactctcctaatgcccgaaaaaccgttgcttcttgtgggattccctttccaacttgttaattaattaagccttcttataattaaagtgtgggatatatatatat

SEQ ID NO: 49709 - DNA, 384 bp, Glycine max
  Clone ID: LIB3167-010-P1-K1-B10
cctccactctctctatatcctcttcatccacccttgttgatgccaagcctccaactccaagacaatgcgtcacccttcccactcttccccctccaccttttcactctcagactcgtccttggaagaccactgctttctgtcgtaggcttgctcgcaattttatggcaatggccaccacaagagaggcagccgcagcagaagttgccgccacaactgacctctctattgccgagacgccagagattgtgaagactattcaagaagcttgggacaaagttgaagataaatatgcagtgagttcactggccgttgctggtgtggttgcattggtgggctcagctgggatgatctcagcaattgataggcttcctttaattcctgggc

SEQ ID NO: 49710 - DNA, 382 bp, Glycine max
  Clone ID: LIB3167-010-P1-K1-B11
aagcattccatagcctcccataaaaatgaagaatactatcttctctgctctctttctactttgtgccttcaccacctcatacctaccttcaaccaccgcggtggtcgataccgacggtgatattcttcagaatcctggcacatactttatcttgtccgtttttcgacccggcggcggagtagaattcgccgccactggaaacgaaacttgccctctcactgtcgtgcagactctcttcgggaggggctttccagcaatattatcgtcccggttacgaatccctttcatcggcgaaggacaactcttcagcatcctgttccgtattgtgccatggtgcgccaccactccttctaagtggaccattgtggagggtttaccagaa

SEQ ID NO: 49711 - DNA, 383 bp, Glycine max
  Clone ID: LIB3167-010-P1-K1-B12
ccgacgcgtgcgtgctgacgcatgctaaaaccctaacgtgccctgtttcatcagtgcgcattgtgcatatcacaaaagctctgattctgaggggaagcatgcggtagtaggaggcgaatactaccagactgtatccagatgacaagctactcaagggagagtgaaaacatgggctgatcagaaccactacatcatgaagagtgtcaaaagcccagtgagagaacgagacattcttactctacataccaccgcaagggaatcaagatcgggactctcaacgggactgaccacaaaaaactgatatggtgaaactggtgcaattagtaacactggcacagcataccctgttgtatacactgagcaaatgagggttgtggacatgg

SEQ ID NO: 49712 - DNA, 263 bp, Glycine max
  Clone ID: LIB3167-010-P1-K1-B2
ctcataacacaaagcacaaagcaaagctcatcttgagttaaaaaaggcagcagctcttcatggctcttcatccccatctggctggcaaggccggaagctggcccatcagcccagaaggggaaggggagcatgagaagaccgcaccaacagctctcagagcccaggtcggccaaccgagtaagtactggcccatcttgcgagccccgcctaccaaccggagtccaggcactacgctggcactgtgggcttcccaaccaaaacct

SEQ ID NO: 49713 - DNA, 383 bp, Glycine max
  Clone ID: LIB3167-010-P1-K1-B3
cccacgcgtccgctttccttagaggaacataaatccagactgaaggaaaaactaggatgtgaaccctctgatgatcaaatggcaacttctttgaagatttctcgcactgaactacgagcaagaatgatagagtgctctctggcaagagaaaagttggctatgagcaatgtacgcttagttatgtctattgcccaaaagtatgataacctgggtgcagaaatgggtgaccttgttcagggtggcttgattggattactgcgtggtattgaaaagttcgattcttcaaaagggtttaagatttcaacttatgtttattggtggatacgtcagggtgtttcaagagctttagttgagaattcaagaacattaagattgcctgctca

SEQ ID NO: 49714 - DNA, 385 bp, Glycine max
  Clone ID: LIB3167-010-P1-K1-B6
cagaagcatttgccaagaacagggctcttgaggtgatccatgggcgatgggccatgcttggagcactaggatgcatcaccccagaggtgctagagaagtggttgagagtggacttcaaggagccagtgtggttcaaagctggagcccaaatattctccgaaggtgggcttgactatttgggaaacccaaaccttgtccatgcacaaagcatcctggcagtgctgggcttccaagttatcctaatgggccttgttgaagggtaccgcatcaatgggcttgatggggtgggagagggcaatgacctctaccctgggggccagtactttgacccactgggcctagctgatgacccagtcacttttgctgagctcaaagtcaaggagat

SEQ ID NO: 49715 - DNA, 381 bp, Glycine max
  Clone ID: LIB3167-010-P1-K1-B7
tactttgttcggtagctacttcgcttctaccctccattccattctctggaacaatgtctgagaaaatcacagctgaaaaccttttaaacacccttgtggaaacacttactgagaagcaaaaatctggatcattttttgaagaagacaagtcaagctcagtgagctaccaattcaacagactgtttggacgccagaaacctgtgcaccatattttagggggtggaaaatctgctgatgtcttgttatggaggaacaagaagatctctgctagcgttttatcggcagcaacagctatatgggtgctttttgaatggcttaattataatttcataactattttattctttgttgtggctcttggtatgcttggacagtttcttt

SEQ ID NO: 49716 - DNA, 268 bp, Glycine max
  Clone ID: LIB3167-010-P1-K1-B8
tactttaatcagtaaactacttttcttctaccctacattcacattctatggaggcgagaggttgaaaaaataacagatgtaaaaccttttcaacaccattgtgtaaacacttactgcgaagcaaaactatggatcattttttgtagaagacaacctaagctcaatgagctaccaattcaatcaaaatgtttggactccagaaacccgtgcaccatctcatatgaggcggataatatgctaatgtcttgttatggaggtacaataagat

SEQ ID NO: 49717 - DNA, 383 bp, Glycine max
  Clone ID: LIB3167-010-P1-K1-B9
taaactctatctttgtctctgtttttctccaacatcattcacttcattattgcacctttcagtttccactcacagctcttaactcaacccaacacaacacaaacactctctcttcatttaattttaattctatatctccctccctccattgaaagccacccaaagttcgcatcttcaacaccagagccaaaatgggtgcatctggaaaatgggtaaaagcattaatcggactcaacaacaagagcgaccttggtgggaagaagaagaaatggaggctgtggaagagttcttctgcgggagaaaacatatctcaaggcaacgactatgctagtagtgtggcttcggattctttcaattttgcagtggccactgcggtcagagct

SEQ ID NO: 49718 - DNA, 385 bp, Glycine max
  Clone ID: LIB3167-010-P1-K1-C10
gagataactagaaacagtgtgatgattttttatgtccttgttttcttcgttgctgcagggttggtagcatggcaatgccatgcatacgatatgttccctctccgaatgaacactggctatggtgcccgtactccggaggtgaaatgcgcaagttggaggcttgctgtggaagcacacaacatctttggctttgacaccattcctgaagagtgcgttgaagcaacaaaggaatacattcatggcgaacaatttatatcagactccaaaacagttaaccaacaagcttacttttatgccaaagacctctcagtccatcccagggacacatttgtgttcaatttagatggcagcgtactctctaaaatttcattctacaaaaaacatg

SEQ ID NO: 49719 - DNA, 381 bp, Glycine max
  Clone ID: LIB3167-010-P1-K1-C12
cttttatgctagtgaacgcgaagtccatcacaacgacatatttatattcggcatagataacaccgtactctctaatatcccatactatgaaaaacatggatatggggtggaggaatttaatgaaaccttatatgatgaatgggttaacaagggcgacgcaccggcattgccagagactcttaaaaattacaacaagctgttgtctcttggcttcaagattgtattcttgtcaggaagatatcttgacaaaatggccgtaacagaagcaaacctaaagaaggctggcttccacacatgggagcagttaattctcaaggatccacatcttatcactccaaatgcactttcatacaaatcagcaatgagagagaatctgttgag

SEQ ID NO: 49720 - DNA, 224 bp, Glycine max
  Clone ID: LIB3167-010-P1-K1-C3
tttcttaatattctcacaaaattattctctcccctccgtaatggagtccacgccggtgaattgggaagccctcgacgctctgctcatcgatttcgccaaatcggaaaacctaatcgaggactcctccgcgctctctccgtcgtcgccgtcgtcatcttcgtatcactcccgcctcgtcatccgtcagatcagacgcgccgtcgagaccggagccattgacgccg

SEQ ID NO: 49721 - DNA, 346 bp, Glycine max
  Clone ID: LIB3167-010-P1-K1-C4
cccacgcgtccgcccacgcgtccgcccacgcgtccgaaagtctgcatctttactcttcttatatttgatagattcatagcagtgtctattttatgtgtaagtactgatgtgcagttttgaatacttgtttaaggatagtcttaatgtcaagttgcttgtgaatcattaaggaatttgttatgtaagaattacttcccaaaagatgtgtttttcttttagtgtcctatcttgcaagtggatgtgtaaatttgtagttctctatatttactatttgctgcacaatgattcattacaaaaaaaaaaaaataatattaaaaaaactacaaactagtcatacataagatca

SEQ ID NO: 49722 - DNA, 384 bp, Glycine max
  unsure at all n locations
  Clone ID: LIB3167-010-P1-K1-C6
gagatacctagaaacagggagacgatttttaacgaccttgttttctactgtgctgcggttttggtagcatgagagtgccatgcntacgatatgttccctctccgaatgaacactggctatggtgcccgtactccggaggtgaaatgcgcaagttggaggcttgctgtggaagcacacaacatctttggctttgacaccattcctgaagagtgcgttgaagcaacaaaggaatacatccatggcgaacaatatagatcagactccaaaacagttaaccaacaagcttacttttatgccagagacctcgaagtccatcccaaggacacatttgtgttcagtatagatggcaccgtactctctaatattgcatactacaaaaaacat

SEQ ID NO: 49723 - DNA, 324 bp, Glycine max
  Clone ID: LIB3167-010-P1-K1-C7
cagattttgattcgattcgattcgattcagtcgaggttttaagcagcagcaagatgtctgggcgtggaaagggaggaaagggattgggaaaaggaggagcaaaacgacatcgtaaggtgctccgcgacaacattcatggaattacgaagccagcgattcgtcgttaggctcgcatgggtggcgtgaagcgtatcatcggtttgatctacgaggagactcgcggtgttctcaagatcttcttggagaatgtcatccacgacgccggtacttacacggagcacgctaggaggaagaccgatacagctatggacgttgttcatgcgc

SEQ ID NO: 49724 - DNA, 337 bp, Glycine max
  Clone ID: LIB3167-010-P1-K1-C8
cagattttgattcaattcgatttttttcagtcaaggttttaagcagcagcaagatgtctgttcgtggaaagggaggaaaggtattgggaaaaggaggagctaaacgacatcgttaggtgctccgcgacaacattcatggaattacgaagccagcgattcgttgtttggctcgcatgggtggcgtgaagcgtatcatcggtttgatctacgaggagactcgcggtgttctcatgatcttcttggagaatgtcatccgtgacgccgttacttacacggagcacgctaggaggaagaccgttacagctatggaccttgttcatgcgctctagaggcatgg

SEQ ID NO: 49725 - DNA, 380 bp, Glycine max
  Clone ID: LIB3167-010-P1-K1-C9
caaggattgggttttcaccgatcaatcattgcctaatgatcttgtcaagagaggagttgctgttaaggatccatctgctccccatggagttcgacttttgatcgaggactatccttatgcttctgatgggctagagatatgggatgctatcaagtcttgggtggaagaatatgtctcattctactacaagtcagatgaggaacttcaaaaagaccccgagctccaagcttggtggaaagaacttgtagaggtgggtcatggggatttgaaggataagccatggtggcaaaagatgcaaactcgtgaagagttggttgaagcttccgctaccctcatatggattgcttcagctcttcatgctgcttgtaactttggacagt

SEQ ID NO: 49726 - DNA, 382 bp, Glycine max
  Clone ID: LIB3167-010-P1-K1-D10
gtggcattcgtcactctcgtgtcttgtgaaggcgaaaaccaaatcaagatgctgagagtgggcgcaaagaggcttttgggaacaacgtcgttgtgcgttagggttccggcgaggctgtaccactagagggttgtggatcactacgacaacccccggaacgttggatcgttagacaagaacgacccgagcgtggggacggctttggtggtggcgccggcgtgcggcgacgtgatgaagctgcagattaaggtcgacgacaaaaccggaaaaatcgtctatgctcgattcaagactttcagttgtggctccggcattgcttcttcctgcgtcgctactgagtgggtgaagggaaagcaaatggaggaagttctgactataaaaa

SEQ ID NO: 49727 - DNA, 381 bp, Glycine max
  Clone ID: LIB3167-010-P1-K1-D11
cccacgcgtccggtgactcgttcttcttcgtcgttatcttcttcttttgttgtttgtgtgtttgttttttctctcacctgaaaatgtcttgctgcggtggtaactgtggttgcggaagcgcctgcaagtgcggcaacggctgcggaggctgcaagatgtacccagacttgagctacaccgagtcaaccaccaccgagaccttggtcatgggagtggcaccagttaaggctcaattcgagagtgctgaaatgggtgttcccgctgagaacgatggctgcaaatgtggagctaactgcacctgcaacccctgcacttgcaagtgaggtgttggagagctaaagcttcaagcagagatggcccttagaaataatgataaaaact

SEQ ID NO: 49728 - DNA, 382 bp, Glycine max
  Clone ID: LIB3167-010-P1-K1-D12
gttaatgacgaagagaatacaacacatactggatcttctctctgtctattaaagtctatggataaatatgcaaggcttatgcagaaattggaagtggtaaatgttgagttcttcaagggagtatgccaattgtttggattttttttctattttatatataaaacatttggtcagcaaaacgctagttcaactggaaaaggcacttctagctctcttaactatcgcctgagaacagctttatccagagtaaaccaagattgtgaagagtggattaagtctcaatcgtcgtcaccaacatctttgagttcaccatttgtacatgctgagttgacacctacacaccctcccaatacaaattatggtcactcctcagggacttctt

SEQ ID NO: 49729 - DNA, 383 bp, Glycine max
  Clone ID: LIB3167-010-P1-K1-D3
cactaactaaatgccgagcagcgagagagagaaaccctagcaaaaatgccggctggtcacggtttgagatcccgcaccagagattccttctctcgtcccttcaggaagaagggtaccatcgccctcaccacatacctcagaacctaccacgtcggcgattatgtcgacgtcaaggttaacggcgccgtccacaagggaatgcctcacaagttctaccatggccgcaccggtcgcgtctggaatgtcaccaaacgtgctgttggggtcgaagtcaacaagcaggtcggcaacagaatcataaggaagaggattcacgtgcgtgtggagcatgttatgccatcaaggtgcactgaggagttccgccttaggaagatcaagaatga

SEQ ID NO: 49730 - DNA, 393 bp, Glycine max
  Clone ID: LIB3167-010-P1-K1-D4
agccttccggttttaacctagtttatcgggaggagattatgaagttgtttgttttctttgttgctgcagtagttttggtagcatggccatgccatggcccaggctaccaaaggttccctctccgaatgaaaactggctatggtgagcgttcttcggaggtaaaatgcgcaagttttaggctggctgtggaagcacacaacatccgagcctttaaaaccattcctgaagagtgcgttgaaccaacaaaggactacattaatggcgaacaatttagatcagactctaaaacagttaaccaacaagctttcttttatgctagtgaacgcgaagtccatcacaacgacatatttatattcggcatagataacaccgtactctctaatatcccatact

SEQ ID NO: 49731 - DNA, 384 bp, Glycine max
  Clone ID: LIB3167-010-P1-K1-D5
attcttcaaaaaactctagaatttgcatgcactgttcttcatacaatggcattacgcgagcttattgtgatggggttattgctgctggtttgtcttgcaaaggtttcatctgatgttaacatagaaaaggagcaagatgaagaatttcgctttcctgttgaccatcttatcgtgagaggcgggaacagaaggctaatgcaggacatagattgtggaggattgtgcaagacaaggtgcagtgcccattcaaggccaaatgtgtgcaacagggcttgtggcacatgttgtgtgaggtgcaagtgtgttccacctggaacttcctgcaacagggagctttgtgggacctgctatactgatatgaccacccatggtaacaagaccaag

SEQ ID NO: 49732 - DNA, 381 bp, Glycine max
  Clone ID: LIB3167-010-P1-K1-D7
cccacgcgtccggtttacttctcgcaatgatcctccaacattctccatggatgactttgaaggtaatctgctttttggatgttggaagatggaacttggttgttaggataatggttctgctgtaaattatcagcaatccctcgaggcagggaaattgttagagatagttccacaatggaaattgtacagaacttgaacacaaataaagaaggaatgaatttccaggagagacagactagctgcaggcatagtaccaaaggaatactcaattttggatagataaactttgatgtcaatccttagctcttggaaattcaaccatatcatcaagtccttccttagctggggagagaaaatcgttctcaaatgttactaggcttg

SEQ ID NO: 49733 - DNA, 380 bp, Glycine max
  Clone ID: LIB3167-010-P1-K1-D8
cggagattctcgttacctataatgccgccacgagcctcttggttgcttctctgatccacccttcaaagaaaacaagttacatcctctctgacacagtgaacttgaagagtaatcttcccgaatgggtgagcgttgggttctctgccaccaccgggttgcatgaaggctccgttgaaacccatgatgtgatttcttggtcttttgcttccaagttgtcagatggtagcagcaatgatgctttggatcttccaagctttgtgctcaatgaggccatctaacttcaaacatcgtagttaaatgtgacaaaagaaaaatgtaataacgccctaacttgctagaggctggtgctactaataatgtttgtcacaaaaattatataa

SEQ ID NO: 49734 - DNA, 382 bp, Glycine max
  Clone ID: LIB3167-010-P1-K1-D9
gcttccgcgggcagaattagaattggcaatctctcccaaaggtctttccggggcttggttgtcaaagccgccaccgttgttgcccccaaatacaccgcgattaagcctctgggagacagagtgctgataaaaattaaggaagcagaggagaaaactgagggtgggattttgcttccatcaactgctcaaacgaagcctcaagggggtgaggtggttgctgttggagaaggaaagacaattgggaagaacaatgtagagattagtgtgaagactggtgcacaagttgtgtattcgaagtatgcaggtactgaggtggatttcgatggtacaaagcatcttattgtgaaggatgatgacattgttggtatccttgaaactgatg

SEQ ID NO: 49735 - DNA, 386 bp, Glycine max
  Clone ID: LIB3167-010-P1-K1-E1
acccttccggattgtttttgcagtttcttctgctgctctgatgctccccattttgaccactttcttggtagctccttctggagtgaaaggtggaagcatctcattctctggttgcattcagcttcttggcttctgtgcttttgagagttgtgttggcatattctggccatccattatgaagatgagatctcaatacattcctgaggaggccaggagcaccatcatgaactttttccgcattcctctcaacatttttgtgtgtgttgtgctgtacaatgttgatgcattccctatcactgttatgtttggcatgtgctcaattttccttttggtggcttgtatcttgcaaaggcgactgatggtgatttccgataagccaaaagatt

SEQ ID NO: 49736 - DNA, 383 bp, Glycine max
  Clone ID: LIB3167-010-P1-K1-E10
cactaactcactgtgagagcaaagatgaagaagaatgaaggacgccggacagagccacatggcgaacggaaagctgtcgccggagactcggaaggatcggaagtcggcgacggggctgagcggatcgccgaagaagggaggccacggcgggaagttcacgtggatcggccacggctacgagcaagttgagatgccgcacggtgctatggacgccaaggacccgaacttcgaggatccggtggagatcgccaccgtgtgatcgcggtggtttccggtggccaggtctgtaaatagtagtaattggcgaaacgtgttttttcgtgttcaataatgtgaagcgaatcggagaagaagcgttttctgtgattgatagttatagatct

SEQ ID NO: 49737 - DNA, 382 bp, Glycine max
  Clone ID: LIB3167-010-P1-K1-E11
cttcgaagttcgattcctttcttgaatgaacgcaagtcacggttggtggtaagggctggcggtcgtcctcctcaaaatatgggcaaggacgaggatgagaagcagcagcagcgtgtcatacaacaacaacaacaacaagaacaacaagcacctccgcccgtgtctcttagcctggacgacgtgaaccccgtaggactgggtcgaagatcgcggcagttgttcgatgaggtttggagaaagttctcgggattgggtcagatttctaggacaatacggtcggatgatcaggaggctctggatgcccttctggtccgagaaggtccgatgtgcgagttcgcaatccctggcgctcagaatactactgtactcgttgttggtgcca

SEQ ID NO: 49738 - DNA, 382 bp, Glycine max
  Clone ID: LIB3167-010-P1-K1-E12
cccacgcgtccgcctacttctacttcccccctttgctctcaaaccttatcacctaatccttatcctcccaaaccagaaaaccatgtctacctccgcagcttccctcgcactcccaaccctcactctccgaacccgaccttaagctctttgtcgggaatcttccgttcaacgtcgacagcgcgcagctcgcggagctctttgagagtgccgggaatgtggaggtggttgaggtgatttatgataagactactgggaggagcagggggtttgggtttgtcaccatgtcttcggttgaggaagctgaagcggctgctcagcagttcaatggctatgaacttgatggaagagcattgagagtgaattctgggccacctcctgctcg

SEQ ID NO: 49739 - DNA, 382 bp, Glycine max
  Clone ID: LIB3167-010-P1-K1-E2
cttctcttgttttttgcaaattcgcatcccacacagcaagggaaggtgcgagtgagtgagtatggcgtctccattatcagctcaattggttcaatgtcagaactcacttccacctcttcagggtaattttagccaagatgtgtctaaggttcaaaggtcgcgtgtggtatgttacggtaccagatcaccgcttggttattatggtaaagcattgacatcaagatcacataacgccctgaggttttctgtcacgcgacaatctgaagcacggtcaattggatataggagaatgacatgtgtcaatgctgcagacaatgttgtagagcttcaagccaaggtgacaaccaagtgtttctttgatgtagaagttgggggtgaacct

SEQ ID NO: 49740 - DNA, 205 bp, Glycine max
  Clone ID: LIB3167-010-P1-K1-E4
ctattaacgaaaagaacatctattgtttgactagattggatcacaacatggcattacgccaaatctctgaaagactgacgcgccatgaatctgatgtaaagaatgtcattatctagggcaatcactcaataaccaagaatactgatgttaatgatgcaactgttgcaacctcagctggggagaagcccgtccgagagctcatagc

SEQ ID NO: 49741 - DNA, 387 bp, Glycine max
  Clone ID: LIB3167-010-P1-K1-E5
gagaaaccagctttgagacagttatggctcacggtgcttacagcaagcggcgcgtgagcgcaacgcgtagatccaactccaagcctctcggcatcgccaagaagtccaaaccctccgtttccctcaaaaaccagattcgatcccttgagcgcatgctccgcaagaacctgcctcccgaggtgcgcgaggcgcatgagcaaaagttggaggcactgaagaagcagcaggagattcacacgcgcctcgccgacgaacgcaagatattcttgcgcgaccggaagatcaagttcttcgagaggaggaaaatcgaaagacgaatcagacgcctcgagaaactgcaccgtgcttcttcttcctcttgttactctgcccaaccttactctgact

SEQ ID NO: 49742 - DNA, 320 bp, Glycine max
  Clone ID: LIB3167-010-P1-K1-E8
atctccctccccccactcccacttttttactccaaacaaaccctaaatctctgtgggctatttattcttgtgagaacttcaaccatgagagatatccttcacgttcagcatagccaatagcggtgaccaaatagtatccaaattctcggaggcaattttactcgagcacgacattaatactaccacatagtacaactacattcgccacaccgtcttccaactagaacggatcagacgctatcactaataggctcttatccgaacttacgtttcgaaaacagatctttaggatttttatccttctaacattaactgcatta

SEQ ID NO: 49743 - DNA, 365 bp, Glycine max
  Clone ID: LIB3167-010-P1-K1-E9
cactgactccccctaatagcacttatttcgactaacgaacgctgactcaaagagggacacttcctacggatcgctgagcacccatactagaaaggatacaaagtcacagacgccactgcgctaaccaatttagaacgaagctctgcgcggatatatcacaacgatcacgtcatgactactaccacgaaggactacttctgaggccacagacgcctacaaatcgagaggatcaatgcctattacagatcggcacactggcgaaagggacgttatcagagcaccgcttatggatcttgaaccttgtaccatggacagcattatatctggcccttacggtaagatatttcatcatgacaacttttttt

SEQ ID NO: 49744 - DNA, 379 bp, Glycine max
  Clone ID: LIB3167-010-P1-K1-F1
gtggagaactaagaaggagaagcaaatggcttcctcaatgatctcttccccagctgttaccactgtcaaccgtgccggtgccggcatggttgctccattcactggcctcaagtccatggctggcttccccaccaggaagaccaacaatgacattacctccattgctagcaacggtggaagagtgcaatgcatgcaggtgtggccaccagttggcaagaagaagtttgagactctttcctacctgccagaccttgatgatgcacaattggcaaaggaagtagaataccttcttaggaagggatggattccttgcttggaattcgagttggagcacggtttcgtgtaccgtgagcacaacaggtcaccaggatactacgat

SEQ ID NO: 49745 - DNA, 340 bp, Glycine max
  Clone ID: LIB3167-010-P1-K1-F10
ggaacctttgctgcaccagcacatacttatgctaagcgcagttgctttgctggggaactggaaacacttctgggctcactattggggggattatgctcgctgggtggagtcaaaatacgattaggctacagtcttcattctagatattgcataggatgattggtaaatcttgtctgttgattcattattgaagtacaacggttgttgacttttttattcctctgaagcatattgtaattgagcaatacggagggagcaagcaccatgactcgagtctcaattataccctttatggtgccagtgaaggtataagaccatcttcgtactagcaaaagctgag

SEQ ID NO: 49746 - DNA, 382 bp, Glycine max
  Clone ID: LIB3167-010-P1-K1-F11
cccacgcgtccggagataactagaaacagtgtgatgaaaatgaaggtccttgttttcttcgttgctacaattttggtagcatggcaatgccatgcgtacgatatgttccctctccgaatgaacactggctatggtgcccgtactccggaggtgaaatgcgcaagttggaggcttgctgtggaagcacacaacatctttggctttgagaccattcctgaagagtgcgttgaagcaacaaaggaatacatccatggcgaacaatatagatcagactccaaaacagttaaccaacaagcttacttttatgccagagacctcgaagtccatcccaaggacacatttgtgttcagtatagatggcaccgtactctctaatattccat

SEQ ID NO: 49747 - DNA, 381 bp, Glycine max
  Clone ID: LIB3167-010-P1-K1-F12
cccacgcgtccggtaactttcggttcctcccattttccggttcaataaattaaattaaaaaaaccgaaccggcggatctcggtggtttcatggaggctcatggcggagggctccgtcgcatccttgtgctcgccttctgcgtcgccggaatctggtccgcgtacatctaccaaggcgttcttcaggaaaatgtgtcgacgaagcgattcaacggtgaaaggttcgagcaccttgcgtttctgaacttggcgcagaatgttgtgtgtttaatctggtcgtttatcatgataaagatgtgggctagtggaaattctggtggtgctccttggtggagttattggagcgctggaattaccaacaccattggtcctgctatgggaa

SEQ ID NO: 49748 - DNA, 386 bp, Glycine max
  Clone ID: LIB3167-010-P1-K1-F2
cccacgcgttcgcccacgcgtccgcacagcagaactctgcttcttcggattccgatcgcacgcgccgtcaccatggtgaacgttccgaaaacaaagaagacatactgcaagagtaaggagtgcaggaagcacacgctgcacaaggttacccaatacaagaagggtaaggatagcattgctgcccaaggaaaacgccgttatgatcgcaaacaatccggttatggtggacaaactaagcccgtcttccacaagaaggctaaaaccaccaagaagattgttctgaggttgcaatgccagggttgcaagcatgtctcccaacacgctattaagaggtgcaagcactttgagattggtggtgacaagaagggcaagggaacatcactctt

SEQ ID NO: 49749 - DNA, 143 bp, Glycine max
  Clone ID: LIB3167-010-P1-K1-F3
tcggggagatccggggagggtgggggttgggtagtgttttctactttgctagcatagggagtttatttagcaccaaggcttatatactgatattgttgtactgcctgagaggttagcatataaacatgacagtgatatggcaa

SEQ ID NO: 49750 - DNA, 288 bp, Glycine max
  Clone ID: LIB3167-010-P1-K1-F4
ttccactcgtccggggagatccgcgtagtgattggagttgggtacatgttattacggggggaactttctaaaatttggtactcccaccaataacatacaagacttactacacgtgtctgaaacgtaagtatcacaccatgaacaaggttacccaatacatcaatttaatgatatcttagctgcccaatcaaatcacccatattatcacaaacaatcatgttattgtctacaaactaaatccttttaccacaataaaaataaaaccacttataataataactttaagac

SEQ ID NO: 49751 - DNA, 383 bp, Glycine max
  unsure at all n locations
  Clone ID: LIB3167-010-P1-K1-F5
cccacgcgtccgcccacgcgtccgtgctctcaaactggaaactgttcctgattggatagcaattgtaggaagtggttatattggcctcgaattcagtgatgtatatacggcccttggaagtgaggttacttttattgaagctttagaccagctcatgcctggatttgatcctgaaattagcaagttggctcagagggttctcataaatccncggaatattgactatcatactggagtttttgcatccaagatcactcctgcatgagactgaaaacctgtcacaattgagctcattgatgcaaagaccaaggaacagaaggacactttagaggtggatgctgcactaatagcaacaggaagggctccattcacacaaggtcttg

SEQ ID NO: 49752 - DNA, 385 bp, Glycine max
  Clone ID: LIB3167-010-P1-K1-F6
ctcatccttcttctttctgtatccgtatcacttgcaacacacatggctacaatcaccaacactttcatattcaaaccccccatctctcatcacccaaagcagcttctttattcccaccgctcttctctacgctttctcaccaaatttaaaaccccctccggagcgaattctcggcggctggttccgaaagccacggcggctcccggggccaagaagacagaaaagccgcacgagagagtccagcgagtccacagcgtggaggagttcgagtcggcgctcgaatccgccaaagacaggcttgtggtggtggaatacgctgccagcgacagcgaggagagcagccagatataccctttcatggtggagctgagccgcagctgcaacg

SEQ ID NO: 49753 - DNA, 330 bp, Glycine max
  unsure at all n locations
  Clone ID: LIB3167-010-P1-K1-F7
atgaacagtttatcaatggcacttgtccacccaaatcttcttcccacttccaaggccaacactcttacctttccttccatcaaactcaaaccctcactgtcgcacgtgccttctccaacccccacacgcttcagtctctctgtttccgcggcggaaaccaccgcgtttgccggccctccgactccccaagctgagaagcttggagttgccgttaagccagcggagacgcccgagctagtgctgagagtcatatggatggaggagaacatggnaatcgcgcttgaccagatggcaccggtccatggcaccaatactctgagcccatcttac

SEQ ID NO: 49754 - DNA, 373 bp, Glycine max
  Clone ID: LIB3167-010-P1-K1-F8
gagaacttcaagtgagggtgagagtgacacaaatctagagagagcactagtactctaaaagtctattatattcttcaaaatatgaccatgcatcgcgagtcttgggcttttgtcttcggcgttatgggcaacatcatctcctttggagtgttccttgctccattgccaaccttttaccaaatctacaagaagaaatccactgaaggtttccagtcacttccttatgttgttgcactgttcagtgcaatgctttggatttactatgctttcgtgaaaagggaaactgccctccttctcattaccattaacacatttggaattgttgtggagtcaatttacctttctatcttcctaatttatgccccaaggaagc

SEQ ID NO: 49755 - DNA, 382 bp, Glycine max
  Clone ID: LIB3167-010-P1-K1-G1
cccacgcgtccggataactagaaacagtgtgatgaaaatgaaggtccttgttttcttcgttgctacaattttggtagcatggcaatgccatgcgtacgatatgttccctctccgaatgaacactggctatggtgcccgtactccggaggtgaaatgcgcaagttggaggcttgctgtggaagcacacaacatctttggctttgagaccattcctgaagagtgcgttgaagcaacaaaggaatacatccatggcgaacaatatagatcagactccaaaacagttaaccaacaagcttacttttatgccagagacctcgaagtccatcccaaggacacatttgtgttcagtatagatggcaccgtactctctaatattccatac

SEQ ID NO: 49756 - DNA, 377 bp, Glycine max
  Clone ID: LIB3167-010-P1-K1-G11
accacgcgtccgctcaccaatcgcatttgcatgaaaaagtacctgtgtaacatggagcatcagcacattcactgacacacatccacccattaaggctgacgcactctgaacggaaatagagaaagatgctgacaatatcaagagactactccaggaatgggacttggtcattcgcgctgaaggcccagcttgttgagagcctttcctatcgaggggcatcgcacttgtcgccgaactcactgatcggattgtgccatccgctatttacacaatgctatgcgcgttttacggatcaacggttcacggacacacatagttggacccctactgcgggttcatgaatcctgtgccaacatacgcgatcacttccttgaacc

SEQ ID NO: 49757 - DNA, 93 bp, Glycine max
  Clone ID: LIB3167-010-P1-K1-G12
ttcagtcttatttcgactctaatggttgactttgcttgaaatcaacgttcagtagtataattaaatccgtgttcacaaacacaaacatacaac

SEQ ID NO: 49758 - DNA, 338 bp, Glycine max
  Clone ID: LIB3167-010-P1-K1-G2
aggtgtagcaatgatgataagtaatgactaaaattaagtttgaacagctgataaggggggggctacaataaaagggagcaaggcaatgccatgcatacagatatgttgggtctccggttgaacactggctatggtgcccgcactccggtggcgaaatgcgccggttgttggcttgccctggatgcactccacagtgtttggctttgagaccattcctgccgggtgcgccttagcggcaccggagttcatccctgtggaacaatttggctcagactccactggggttaacccactagcttacttttatgccagagacctctaagtccatcccaaggaca

SEQ ID NO: 49759 - DNA, 382 bp, Glycine max
  Clone ID: LIB3167-010-P1-K1-G3
cccacgcgtccgtcatcttcgtcttttcttcaacagagcggggctcaatactagctagttctattacgtggtgcgcgaccatgaacatggcgaccgcgcttctgttgatggctttcgcagcttcatcagcttgagacatgtcaatgatatcgcacgacaacgctcatgcggatagggccactaggcgcaccgacgaggaggtgatgtcaatgttcgaggagtggctggtgaaacacgactaggtgtacatcgcgctcggtgggaaggacaagaggtgtcaaatcttcaagcacactctgcgcattatcgatgaacgaaactctctagaccgaacctacaagttgggactcaacgagctcgctgatctcaccaatgcggagta

SEQ ID NO: 49760 - DNA, 310 bp, Glycine max
  Clone ID: LIB3167-010-P1-K1-G4
ctccgtccactcgtccggattattacaataatcatacaaaacggggcccaattctgggggaggttattacatggtgggcgcccatcaacaccccgaccacacttctgtgcatggctttctgaacttcatcatctttacacatcccaataatatcacacgacaacgctcatgcgtatagttccactaggctcaccgacgtggaggtcataccaatcatcgagaagtcgctgctgaaacacgacattgttttcatcgcgctcagtttgtttgatacaatcgtttcaaatcagcaagcacactcttcccatta

SEQ ID NO: 49761 - DNA, 323 bp, Glycine max
  Clone ID: LIB3167-010-P1-K1-G6
tccggttaaatacacgaaaatttctatttagtcactctctaactgagaaagtgcttgcaagagagaaacaagaggggcgcggtgaccacgctcaaagtgaaagtgaatatacaaaatgattattgcatttgcatgatcaggaaccaccccataagctttttactgcatttagattctgagggagaatgatccaaagtctcttctgtttgttgtggttgtaaacagagagatatcaatttaactaaggagtgtcattttagattcagatattccaaatcacaccgttggagttcactttgtgcttgttgatcattgtgattctt

SEQ ID NO: 49762 - DNA, 403 bp, Glycine max
  Clone ID: LIB3167-010-P1-K1-G7
tccggttggacccacccttccgcccacccgtccgttaagacctcccttttgagaccctaggacacacaccacaccacaaacacacagagttggaggagaaatcatcatggcatcagcagcatctgggtttgtgttgtcacttaatgttgcagctgccaccacaaactcaagggtggtcatgttcaacacatagaacaacgcttctaggcttgttgtaagggcttcagatgagcctgcagcggcggcacccgccaccgccacacccccagcttaagctgaagctaaaccaaagccaccacctattggccccaagagaggtgctaaggtgaagattcttaggaaggaatcttactggtacaaaggcactggttcagtggttgctgttgatcaggaccccaacact

SEQ ID NO: 49763 - DNA, 380 bp, Glycine max
  Clone ID: LIB3167-010-P1-K1-G8
cccacgcgtccgcccacgcgtccgcccacgcgtccgatggctgccaaactcactctatcttctcccttttccttcaaaacttcatttctgccaaaatcaccatcattttctctaggtttatactcccccagaactaatgttaccggtgtcaaagttcatgctaaattaggtggtggagatgaacaagccaagaaaggaggaaagaagaaattcataaccagagaggaagaaccacaacagtattggcagacagcaggagaaagggaaggagagaatcccatgaagacccctcttccttacattatcatatttggtatgtcaactccttttgtaatcttggcaattgcttttgcaaatggttggattaaagtacctgttcg

SEQ ID NO: 49764 - DNA, 378 bp, Glycine max
  Clone ID: LIB3167-010-P1-K1-G9
cccacgcgtccgcccacgcgtccgggtttcccagatctgctccttcctcaccccacaggctgatactagactgtaactttcagaagtcagttgaagagcatgggtcgtggagttagcagtggtggtggtcaaagttccttgggttatctttttggcagtggagaggcccctgccgcaaaaccggcaacaaacaatgccccagcccaacctgaagtgcaggctgtaaataatgcgcctccttcaaaagcatctcctcctactaaaacaatagaccctaacaaggctgctggtataaacagtcattctactgatggccagaacaccggcaacttcatcacggaccgaccctcaaccaaggtccatgctgcccctggtggt

SEQ ID NO: 49765 - DNA, 381 bp, Glycine max
  Clone ID: LIB3167-010-P1-K1-H1
ctcctttgcaacactttgatatggctgaacctgccttccttcaaattgctgaatatagagctggaattgtgcctgtggccttcaggagggttccttgtgtgaaaaagggaggaataaggttcacaatcaatggccactcttacttcaacctagttttgatcaccaatgtggctggagctggtgatgtgaattcagtgtccattaaagggtctaaaactgggtggcagcccatgtcaagaaactgggggcaaaactggcagagcaactcatacctcaatggacaatccctctcttttcaagtcaccaccagtgatggcagaactgtgacaagcttcaatgtggcaccagccaattggcaatttggccagaccttccaaggag

SEQ ID NO: 49766 - DNA, 377 bp, Glycine max
  Clone ID: LIB3167-010-P1-K1-H10
accacgcgtccggccagctttctcacttggaaggaaagcctgctgatacatgatcgagcttcggcacagcatctgtccacctatgaccaattaaggcttgctcgctgtacctggatctagagacagaggctgaccatctcaataggcttctcgatgatagtgacgtgcacacttgccgatcatgcgctgcctgataagagccttccctattgagggcagacgcctgagagacgtactaactgaaaggtatatgccctctgctattaaaacatagctatgcgtgttttacggatcaccggctcaaggactcaggttgttggacccctgctcagtgatcatgtatcctatgccaacatactagatcacttctttgaacc

SEQ ID NO: 49767 - DNA, 367 bp, Glycine max
  Clone ID: LIB3167-010-P1-K1-H11
acaccctgtcgttccacctttttcctttgaaagaaaaattacctgtgcaagatagagcttctccaaattcactgaaataattcaaccaattaaggctgcggcactctcatgggaatgagagaaagatgctgccaatatcaagagactactcgaggaaagggacttggtgatttgccctgaaagcacaacttgtaaagagcctttcctcttgaggtgcagagcacttttcgctgaactcactgataggatcgtcccagttgctattaacacaaagcaaagcgcgttttacggaacaacggttcgcggacacacattgtcggacccctacttcgtgttcatgaatcctatgccaacatacgagatcact

SEQ ID NO: 49768 - DNA, 383 bp, Glycine max
  Clone ID: LIB3167-010-P1-K1-H12
tcgttctatttatccttattcatgtgcgtctgtcggtctccattcttgaataaacaaaaaccagatagaggaagaggagaagagaaccttgatgggagaaatcaaggaggagtgcgcgagccctgacaagaggaaggtggcactgtactcgagcggggagagcaaggcaaccgctagtgcgtgcgaaacggcgtcatcgcttggaagcatcagccccgaagtgtcgcatctcaggtgggggatgtggtacaagctccgagaactcgaagtcgccactaatgggttgtgcgaagagaacgtcaacggcgaaagtggctacggaagtgtgtaccgtggcttgtttcccgatggcaccaaggttgctggagacctggatctgattt

SEQ ID NO: 49769 - DNA, 372 bp, Glycine max
  Clone ID: LIB3167-010-P1-K1-H2
cccacgcgtccggtcttttcgttcgtacttcccttgtgctgtacaaggaactgtattgtgtcaaaggaagcaattaactcatggatgcacaaaccaaaaatcaaaggattacattgtgcaggatagctgcatgttacagcattcggagaaagcattgaggaggacacttttcctttctgtcttggtctcagctggtgtttttccaactttgtcgacttatggcaagacaaagagtaagaatccgtatgatgaaaaacggttgctttaacataattggcggatacagaaagaaatacattgcgccagaggaactcccaaaatttgttagagtaggttttcaagttaaagtagtatcatcagattactatataa

SEQ ID NO: 49770 - DNA, 384 bp, Glycine max
  Clone ID: LIB3167-010-P1-K1-H3
cccacgcgtccgggatggggtgctcatggtggtggtgctttctccgggaaggaccctaccaaggttgataggagtggtgcttacattgtgagacaggctgctaagagcattgtggcaagtggacttgccagaaggtgcattgtgcaagtgtcttatgccattggtgtgcctgagcctttgtctgtgtttgttgacacctatggcactgggaagatccatgataaggagattctcaacattgtgaaggaaaactttgatttcaggcctggtatgatctccatcaaccttgatctcaagaggggtggaaataacaggtttttgaagactgctgcctatggacactttggaagagaagaccctgacttcacatgggaagtggtcaaa

SEQ ID NO: 49771 - DNA, 377 bp, Glycine max
  Clone ID: LIB3167-010-P1-K1-H4
cccacgcgtccgggccaatataccgttggtacagacaggttactgtgttggagctgtcgggaccgagcccttctgtaccccaaattttacgtggtctaggtaattctctcgctggagtagacagaactttcaatgaattactacaggacttgacattttcccatgaagtccaagcacgaatggacggaatcatgtttgagaaattggaaggatatccatatgccaaccccattttggcattgataaaagattatgttagctccctgtagttatttataaactcttacttctattcgtgttttctacttgataatgatgcatacaataatgatgcatacaatccactgacacgcacatacccatgcgtgaatgtctca

SEQ ID NO: 49772 - DNA, 393 bp, Glycine max
  Clone ID: LIB3167-010-P1-K1-H5
accaacgcgtccgctgttaccactgtcaaccgtgccggtgccggcatggttgctccattcactggcctcaagtccatggctggcttccccaccaggaagaccaacaatgacattacctccattgctagcaacggtggaagagtgcaatgcatgcaggtgtggccaccagttggcaagaagaagtttgagactctttcctacctgccagaccttgatgatgcacaattggcaaaggaagtagaataccttcttaggaagggatggattccttgcttggaattcgagttggagcacggtttcgtgtaccgtgagcacaacaggtcaccaggatactacgatggacgctactggaccatgtggaagctgcctatgtttggttgcactgatgcttct

SEQ ID NO: 49773 - DNA, 370 bp, Glycine max
  Clone ID: LIB3167-010-P1-K1-H7
cttattctacttacctttgctcttattccaaatgcgatggcagccatggcagccgcaaccctctctttaaaccccaaactctcattctttaacggaaagcccgtcacatattcttcccgcgttgcgcccaccaccaaattatccttatacaaacaatgcacaatttccatgtccctaatcccacccacctactacctctattcctgtaaatttcagcccatcaaagaatccatcgtgtcacgggatatgacgcgccgtttcatgaccgacatgataacccacgccgactcctgacatgtaatcgtcggagccggttctgccggtctttgctgcgcgtactagctcatctagaacctccttcgtgagcgtg

SEQ ID NO: 49774 - DNA, 383 bp, Glycine max
  Clone ID: LIB3167-010-P1-K1-H8
cccacgcgtccgcccacgcgtccgcccacgcgtccgccaaaactgctgctgctcccattgaacgtgttaagcttttgatccagaaccaggatgagatgatcaaaactggtaggctttctgagccctacaaaggtattggtgattgtttcaagagaacaatggcagatgagggtgctatttctctatggagaggaaacactgctaatgttatccgttatttccccacccaggctttgaactttgcatttaaggattacttcaagaggcttttcaactttaagaaggatagagatggctactggaaatggtttgctggcaacttggcctctggtggtgctgctggtgcatcatcccttttggttgtttactctcttgactatgcc

SEQ ID NO: 49775 - DNA, 355 bp, Glycine max
  Clone ID: LIB3167-010-P1-K1-H9
cccacgcgtccgatcagaaaaatggcgtccaaagttccaaagaaggccaatctcctggatcaccactccatcaagcacatccttgacgagtctgtctccgaggtcgtaacgagtcgtgggtatgtggaagacgtgagattgagcaatgcgaggcttttcattggggcaatcatcatcgtcattgctttattcgctcaattctacaagaagaagttccccgaaaatagggattttctcatcgcttgcatcgccttgtatgtgatcttcaatgggttgttgcagctgatcatatacactaaggagaaaaatgccattctgtttacttatcctcctgttggatcctttactagtaccg

SEQ ID NO: 49776 - DNA, 371 bp, Glycine max
  Clone ID: LIB3167-013-P1-K1-A10
gcaacatctagtatttaccctctgcagaatgtgtttgttcgtaaagtcaagatcctgaaagctcctaagtttgatcttgggaaactgatggaggttcatggagattactccgaggatgttggtgcaaaggtagacagacctgctgatgaaatagtggcagaggaacccactgaaattgttggagcttgatttagtgataatgcatattcaaattgttctaggttttctgtttcttatgttatcattgaaaatttaagttacaaacttactgttctgtcaaatgtttctgtgtaagctgagtgacagttttgtttagacaacgagaagacatttttggtgcgtaatatatatctgggttttgtttagaaccc

SEQ ID NO: 49777 - DNA, 394 bp, Glycine max
  Clone ID: LIB3167-013-P1-K1-A11
cccacgcgtccgaagaaaaatggcaaccatcatcgccggcatcccaactacatcgatcactcgcgcaggtcttgtgctcaaacgacctgttggagcctcgtcctctaccgttcttggattgccagcaatggctaaggcagggaaagtgaggtgctccatggaggaaaagccttcaagcagctcaaatatagggatgggggcatccttgttagcagctgcagttgccgcaaccatgtcaagcccagccatggctttggtggatgagagactcagcactgaaggaaccgggcttccctttgggcttagcaacaacctccttggttggatcctgtttggtgtcttcggtcttatatgggctctctactttgtctacgcttccacccttgaagaggat

SEQ ID NO: 49778 - DNA, 386 bp, Glycine max
  Clone ID: LIB3167-013-P1-K1-A12
ggaacgcattcgatcgctacaaatatgtattatttaaaaaaataagacatgtttatggatatttgccttggacgtaacaaaaatagaatatttttccatacacgcacaaatagttgaaggcaactatcctaagaaaaaatgtattatgggaggaacaaaaaaaccagacttgaacgatccagcatcaatagctaaattggctaaggtaatgggtcatactatttattgtaaaactgcattgccacaactatctgatatatattaaacaagctaccattgtaggatctattgccttgaactgaagcttaactggactagaaccatacatgattggagaacccattgatacatctgctactccactggaaagattaccctgatggtct

SEQ ID NO: 49779 - DNA, 379 bp, Glycine max
  Clone ID: LIB3167-013-P1-K1-A4
ctgaagaaagcagcagcagcagctcacattccaccactggatccaccggcgaaagcggcggaggaaacgacgaactcgacctgaaacaaattgaatggtttctaggtttggagaatgagctgcctgttagcaacaacattggtgctgagtgggacaacatggatgacctgtggatgctggacgacgtcgttgtgcccaaccgtcacttaatttactagaaggctaataattaataaatggcgttttcttaagttttagttttattttataaattgtagtataaaactatgttggtatttgtgttcttagttttcttctgctggtttgtctcttctctggctttggtaatttctgttttggacggttgaatgatttcaaa

SEQ ID NO: 49780 - DNA, 397 bp, Glycine max
  Clone ID: LIB3167-013-P1-K1-A5
gggaggcctaggaagtatggccctgatggatctgtttcattgatgctctctcccatgtctgccactgctagttccacgccgggatcaggcacttcttcggagaaacggcccagagggcgcccacctggaagtggaaggaagcaacagcttgccactctaggtgaatggatgaacagttctgcaggactggctttttcacctcatgttatcaccgttggagttgacgaggacattgtaacaaagttattgtcatttgcacggcagagaccaagggctgtgtgcatcttaacaggaactgggacaatttcttcagtcactctgcgccagcctgcttctactagcatcggtgtcacttatgagggccgatttcaaatattatgcttgtctggttcatact

SEQ ID NO: 49781 - DNA, 299 bp, Glycine max
  Clone ID: LIB3167-013-P1-K1-A6
cttctgtgttgttaaaacaaatttctgtgcttgattccctcttctttcaaaaaaaaaaaagaaaaaaaaaaaaaaaaaaaaaaaaaaaaaaaaaaaaaaaaaaaaaaaaaaaaaaaaaaaaaaaaaaaaaaaaaaaaaaaaaaaaaaaaaaaaaaaaaaaaaaaaaaaaagggggggactttttggggaacccaggctaacgcccgcgggggggaaaagccatggcgttttctaaggggaaacctaaattaaattaacgggcggtgttttaaaaaacgaaatggctgaaaaaacccggg

SEQ ID NO: 49782 - DNA, 372 bp, Glycine max
  Clone ID: LIB3167-013-P1-K1-B10
ccctcttttcgacgccaaaacgatgtcgtatgtgcctccgcacctcagaaacgccacctccacctccgtcgccaccgccagaaccccctccgtaacccttgacaacaacaacaacaaccaccaccaccaccacaagctctcattcccctccaacaccaccaccaccaattgctctccctctctctccttccacaacaatgcctctcgccggagctccgccgcgcctccctcgccgcggattcttgccacccccgacgccgtcttcccccaatggcaaccctccgaacgcgtttctcgcatgactcccgagcagattgaagaaatccgatccaggcttaatcttgatgttgctgtcgcatttgactcttcttc

SEQ ID NO: 49783 - DNA, 388 bp, Glycine max
  Clone ID: LIB3167-013-P1-K1-B11
gacagattctgtgtacgatactgtcatagagctaaaaagcaaaatatatgaatttttttttctccttttctggagaatatatataggagcacaatacaatctgagtcagaatcagataagtgttggtttgtttttttgttgagaagagagaatggctgtggcgtcgtcatcatcccttatcacgttgaaggtgaaaccttgcattttcgggtctcctcggagatccgcggtggttcggaattgtgcgaagtcaacggcggggacaatatcgacgatttggagcctggacagctggagggcgaagaaggcgcttcagcttccggagtacccagatgcgaatgaattggacctagtcctccaaaccctctcttcttttcccccaatcgtc

SEQ ID NO: 49784 - DNA, 354 bp, Glycine max
  unsure at all n locations
  Clone ID: LIB3167-013-P1-K1-B12
gacagattctgtgtacgatactgtctttgagctaaaaagcaaaatatatgaggtgggttttctccttttctggagaatatatataggagcacaatacaatctgagtcagaatcagataagtgttggtttgtttttttgatgagaagagagaatggctgtggcgtcgtcatcatcccttatcacgttgaaggtgaaacctagcattttcgggtctcctcggagatccgtggcggttcggaattgagcgaagtcaacggcggtgacaatatngacgatttggagcctggacagcttaatgtctaaaaatgctctttatcttccggagtacccagatgcgaatgaaatgcacctagg

SEQ ID NO: 49785 - DNA, 366 bp, Glycine max
  unsure at all n locations
  Clone ID: LIB3167-013-P1-K1-B4
atagaccccagaagtggtttctgcagctccaattcaatcttctacagcaagcgtaagcccgtcccactccctcccaacaacgccttagacgtcaccaccttcatctcctcccgcgcccaccgcgccaccacagccttcgtcgacgccgccaccgcccgccgcctcacctacnnccagctatggcgttccgtggagggcgtggcagcctctctctccgtggccatggggatccgaaagggcaacgtggtcctcatcctctcccccaactccatccacttccccgttgtgtgcctggccgtcatgtccctcggcgccatcatcaccaccaccaaaccccctcaaaaccacccgcgaaatcgccaagca

SEQ ID NO: 49786 - DNA, 397 bp, Glycine max
  Clone ID: LIB3167-013-P1-K1-B5
cccacgcgtccgcccacgcgtccgcccacgcgtccgataggctccaaactggaatgagaggtgcttttggaaagccacagggtacttgtgctagagtggctattggacaggtccttctttctgtccgctgcaaggacagcaacagccatcatgctcaggaggctcttcgccgtgccaagttcaagttccctggtcgtcaaaagattatagttagcaggaaatggggcttcaccaagtttagccgttctgattatctcaagttcaagtcagagaacagaattgtgcccgatggtgtgaatgcaaagcttcttgggtgccatggaccattggccaatcgtgaacctggaagagcctttttggatactgctactagttcttaggcttgcttttaatttgg

SEQ ID NO: 49787 - DNA, 353 bp, Glycine max
  Clone ID: LIB3167-013-P1-K1-B6
cccacgcgtccgtcatctttcaatttcaatcaacggttatacccttttctatttgagcatcatcatgtccaccgcagcgcagcccaaggccaagaaaacggcgtcgtccaagaagcccctctcccatcctaccttcgccgtgatgatagcggaggcgatagcgagtctgaaggagagaaccggttcgagccaatacgcgataaccaaattcatcgaaggcaagcacaaggagttgcctccaacctacaagaagcttgttctcgttcatctcaagaagtctgttgctgctggcaagctcgttaaggtcaaaaactctttcaagctcgcaccgactaagtctgctcctgttaaag

SEQ ID NO: 49788 - DNA, 381 bp, Glycine max
  Clone ID: LIB3167-013-P1-K1-C10
cccacgcgtccgctggtgactttgggggatggttttgtccgccatggatcacattatgatatttctggcagaattaggaagggaccagcaccatacaatctggaggttcctacgtacaccttcttggaagaaaacaagttgatgattggttgaaaataaaagtggttctgcattcaagtgggatgagtttacaatttatttttttaaaatttatttggacaatgttacaatgctccttttggacgtcgtttgccctcaagttcttgtcgggtatgtttagcaagtgatttatgtagcttcgaaattgtaactgttacccttcggcgagcttataccaataatcgcctgacgtttacttagcatattggtgatggcttcaag

SEQ ID NO: 49789 - DNA, 391 bp, Glycine max
  Clone ID: LIB3167-013-P1-K1-C11
gacagacacaacattatctttcaactgttgctctgcctctgcacagagaatggtgtgggaggggaaacagacatgatctatctgtgttcacagcaccactgtttccctgcctcacacccttatctagaagaacaagaatcagcacatacacccgccacaacgccatagtcatcatcacttagaagaacttcacaatttttattttcttggatatggcgagtcttgctcttgaaaccgaggatgtaatctcagatatatacctttcactgggacttaaggaatcagacaaaggagtaggagttcctcgagttttatctcttctctcttcacttcttgagagatcagttcagagaaacgaaacgctattggaggcaaagcacgtaaaagatgt

SEQ ID NO: 49790 - DNA, 386 bp, Glycine max
  Clone ID: LIB3167-013-P1-K1-C12
gtttgttgtgagctataagctagtttatcgtgaggagaatatgaagttgtttgttttctttgttgctgcagtagttttggtagcatggccatgccatggcgcaggctaccaaaggttccctctccgaatgaaaactggctatggtgagcgttcttcggaggtaaaatgcgcaagttttaggcttgctgtggaagcacacaacatccgagcctttaaaaccattcctgaagagtgcgttgaaccaacaaaggactacattaatggcgaacaatttagatcagactctaaaacagttaaccaacaagctttcttttatgctagtgaacgcgaagtccatcacaacgacatatttatattcggcatagataacaccgtactctctaata

SEQ ID NO: 49791 - DNA, 393 bp, Glycine max
  Clone ID: LIB3167-013-P1-K1-C4
cccacgcgtccgcccacgcgtccgcacagggaaggcagagagtatcatccatggcggccaccagagcaataactatagccagcaactccacatgctctctgcttgcaaagaaaccctttgtgggtggcactgctctttccctcaacaacctcaatttttgtcgtactaggaggtcttacacctgtagagccatctacaatccccaggttgtcgtcaaagaagaaggccaacccgaaaccctcgattatagagttttctttgttgacaaatctggcaagaaggtttctccctggcatgatattcccttgcggttaggtgatgatatctataacttcattgttgagattcctaaagaatccagtgcaaagatggaggttgccactgatgagtctt

SEQ ID NO: 49792 - DNA, 357 bp, Glycine max
  Clone ID: LIB3167-013-P1-K1-C6
caaattcttattagaacgaaaaaagaaaagaaaagaaaaaagagcgatttttccctcaccaaagaagaaccaaaacaatggcggatcaactcaccgatgaacagatctccgagttcaaggaagccttcagcttgttcgataaggacggcgatggttgcatcacaaccaaggagcttggaactgttatgcgttcattggggcaaaacccaactgaggcagaactccaggacatgatcaatgaagtggatgctgatgggaatggtaccattgacttccctgagttcctaaacctcatggctaggaagatgaaggacactgattctgaagaggagcttgaagaggcattcccggttttcg

SEQ ID NO: 49793 - DNA, 389 bp, Glycine max
  Clone ID: LIB3167-013-P1-K1-D10
cgcagagagagagagatccatcgatcaattaatttccaatggccgatcagctcaccgacgaacagatctctgagttcaaggaagcctttagcctcttcgacaaggacggcgatggttgtattaccaccaaggaacttgggactgtgatgcggtcgcttgggcagaacccaactgaggctgagctgcaggacatgataaatgaggttgatgctgatgggaatggtaccattgatttcccagaattcctcaatctcatggcgcgcaagatgaaagacactgattcagaggaagagctgaaggaggctttccgtgtgtttgacaaggatcagaatggtttcatctctgcagcagagctccgccacgtaatgaccaatcttggtgagaagctg

SEQ ID NO: 49794 - DNA, 390 bp, Glycine max
  Clone ID: LIB3167-013-P1-K1-D11
cgcaactaatttatttatttatttttcctttatttatcttctttctctggctcgagcatccaaaagggttgtttttttttttttataagaagaagaggagagggaagatgatgatgatgacaatggaggggatgatggacaagggggtgttggatgatgtgataagaaggcttctggaagggaaaggagggaaacaggtgcaactctctgagtcggagatccgtcaactctgcgtcaacgccagacaaatcttcctctctcagccaattcttctcgacctccgtgctcccatccgcatctgcggtgatatacatggtcagtaccaggacttgctgatgctttttgaatatggtggctaccctcctgcggcaaactacttgtttctggggg

SEQ ID NO: 49795 - DNA, 309 bp, Glycine max
  Clone ID: LIB3167-013-P1-K1-D12
cgcaactaaagtaataaacattcgattggatgttaaataaagagctctggggtagagcatttcaaaacgggtctgaacatgtctgctgttatatagaagacacacgattgtgactttgaagacagttgcattcgtagggatgaatgaaatggctctgtcttttgatgtacgaagatcggttctaaattggaatgcaggtaaccgcgtttgaatatctgtggcgaataacatgaataatagcagtgtttcgtaaatatactgctgatttatctatcacaacgaactcttgctgcttggataatgatgagg

SEQ ID NO: 49796 - DNA, 269 bp, Glycine max
  Clone ID: LIB3167-013-P1-K1-D4
cccacgcgtccgattaaatctaacgaatttatttcgattgattgtatccatatggggtaaggacctttgtgtcagttatgtctgcaatgggtgaggagcagatttgtgcactgaaggatattgggccaaagaactagcctcaattgctggtagtttgctgttttcatttatgcaaaagttatatatttttgtatgatcttgttaaaccccggagttatggagactctaagtcagactagttttatcaactgtgtttatggatgtgacag

SEQ ID NO: 49797 - DNA, 394 bp, Glycine max
  Clone ID: LIB3167-013-P1-K1-D5
atctcgttctcattcctctgtataaataaaatacattgttcttccatcaagtttgtgatgtgagagaagaagagatgggtagaggagaagatcgagaaggggtcgcagtagccgggggcttcttctggtcctacacagacgaaccccatgccacacgacgtcgtcagatcctctccaaataccctcaaatcaaacaactctttggccccgaccactctgctttcttcaagattagtggagttgttctgcttcagcttggtacgggtgctttacttcatgatgctggctggctgaagatatttttagtagcatacttttttggttcttttctcaaccacaatctctttttggctatccacgagttgagtcacaacctggccttctcaaccccagt

SEQ ID NO: 49798 - DNA, 96 bp, Glycine max
  Clone ID: LIB3167-013-P1-K1-D6
gtttgttattttttttttccttacaaatttcatcatgatcaattgtattaaactttcaatgtttttcttgttatacagcgaagagaaattgtcatc

SEQ ID NO: 49799 - DNA, 391 bp, Glycine max
  Clone ID: LIB3167-013-P1-K1-E10
gagagtagcagctagcaatggagatttctgccctagcttcttctgctactccaagaccttctcttacaactccttccacttctccacacactgtagtcaccaccaccttcagcaaacctcaactgagacgctcccacgtagcagtatcacttcctacctcaaccaccatttcactgctcgctctcttcgcccctccaagcgaagccaaagccgctgtcagcatcgccaaagaccagattgtctcatctctcacccaagtggagaaaacgctggatcaggttcaggaagtgggttcgggtgtgctggacacggcacagcgtattgctgaagtgatagggaacgctttgaagcctggcatcgaaacggcgttgccaatagttcagcaggccgg

SEQ ID NO: 49800 - DNA, 391 bp, Glycine max
  Clone ID: LIB3167-013-P1-K1-E11
aacaaacatacatagagaaattcactcatataaaaatcatcacttcaaataaagctagacctagaaagatccagaggtagctacggagagaaacaaagctcatggctggtttgcaaagatctgaggtgtctttcaggagacagggttcatcagggcttgtttgggacgacaagttattatcaggggaattgaacaagaacgaagacccaaagggtgctcatggtggtgaccttaaccttaaccttaacgttagaacaacaccacccatccagagaagtcgctccaacggcggctaccgcaccggaaaagtctcgccggcgatcgagcctccctctcccaagctctctgcttgcggcttctgcagcgccttcggaaaaacaggggaaaaggg

SEQ ID NO: 49801 - DNA, 354 bp, Glycine max
  Clone ID: LIB3167-013-P1-K1-E12
aacaaacatacatagagaaatttatttatataaaaatcatcacttcaaatggagggggacctataaagatccagaggtacctacggagagaaacaaagctcatggctgttttgcaaagatcttatgtgtctttcaggagacaggtttcatcagggcttgtaagggacgacaagttattatcaggggaattgaacaagatcgaagacccaaagggttctcatggtggtgaccttaaccttaactttaacgttagaacatctccacccatccagagaattggctccgacggctgttacctcaccctaaaagtttcaccggcgattgattcctcctttttccacctctttttttgcg

SEQ ID NO: 49802 - DNA, 394 bp, Glycine max
  Clone ID: LIB3167-013-P1-K1-E4
cccacgcgtccgcaaacaccatgagaggcctttgtggtcagaaatgttgccaacattgtcccaccatatgaccagtcaaaatacgctggaactggggctgcagttgagtatgctgttttgcatcttaaggtgtcggagattgtggtcattggacacagtgcttgtggtggtattaaggggcttctgtctttcccatatgatggaacctactctactgattttattgaggagtgggtcaaaattggcttgcctgcaaaggcaaaggtgaagacacagcatggggatgccccttttgctgagttgtgctcacactgtgagaaggaatctgtgaatgtttcccttggaaacctgctaacttacccatttgttagagatggcttggtgaacaaaacat

SEQ ID NO: 49803 - DNA, 376 bp, Glycine max
  Clone ID: LIB3167-013-P1-K1-E5
cccacgcgtccgcccacgcgtccgcccacgcgtccggcagattagagtgtgaagtccaaactctgaaaccctcaactcaaatccaatcctttggttggtttcgaattcgactccaaccaaattcccaacacatggactcggttctcttgcacttgcatctccacactctccctcctctctcctccgccactcaccgccctctctgccaccctctcgccgcctcctccgcttctttccaccgctcttctcctcctctcccacgcttccgcttctcgccgcttctcgccgctaacaccctcaccgctaataacatctcgccaagaagtggactatacactgttggtgactttatgacaaagaaagaggatttacatgt

SEQ ID NO: 49804 - DNA, 392 bp, Glycine max
  Clone ID: LIB3167-013-P1-K1-E6
gagttatcgagggatgcaatgcaatgcaacgcaaaaaggaagaagaaagttgcaaatcgcaatcgcaatcgcaatcacagagagagtgcagttggtttggtacggtgatttaatttgagtttggttaagagtctcctcgtagtgtagtcttctcatttgcattgcaccgaagaatcaaatcaaatcggtggccgtaaacctaagttggttcagatccgatggaggcaatcgaagaattggttcagctctccgattccatgcgccaagccgccgccgtcctcgccgacgaagatgtcgacaactacaagcgcccttccactttcctcaatgtcgttgcgctcggcaatgttggtgctggaaaatctgcttccttgaatagcctcattggacat

SEQ ID NO: 49805 - DNA, 389 bp, Glycine max
  Clone ID: LIB3167-013-P1-K1-F10
cccacgcgtccgcaagtagttgagaactaagaagaaggaaatggcttcctcaatgatctcctccccagctgttaccaccgtcaaccgtgccggtgccggcatggttgctccattcaccggcctcaaatccatggctggcttccccacgaggaagaccaacaatgacattacctccattgctagcaacggtggaagagtacaatgcatgcaggtgtggccaccaattggcaagaagaagttcgagactctttcctacttgccagacctcgatgatgcccaattggcaaaggaagtcgaataccttctaaggaaaggatggattccttgcttggaattcgagttggagcacggtttcgtgtaccgtgagcacaacaggtcacctggatact

SEQ ID NO: 49806 - DNA, 277 bp, Glycine max
  Clone ID: LIB3167-013-P1-K1-F11
cccactcgtccgcaaagagtttttatttaataacaaggaaatggctcccgggatggtctccttcccaggtgggaccaccttcaaccacacccgctccgtcatggaagctccattcaccccccttaaatccacagctggcttccccactagtaataccaacaattacattacctccatcgttagtaactgtacgacgagaacaacccatgcatttgtgacctccaattgtcattaacaaatccgagactagttcctacttgccagacctctattatgc

SEQ ID NO: 49807 - DNA, 389 bp, Glycine max
  Clone ID: LIB3167-013-P1-K1-F12
cttctttatttctacattaattaattattctcttgcaaattccattaatcaaatgatgcatgaactatgatactacccatcttcttctaactgcccaccattgacttgttttgaagcacatttctcatcaatggagagacagagaagtttctccttcaaacccactaggcttttggtcttctctttcactattttttcctccatcctcttcctctctaccttcaccacctggctcaccaattacacaccttcaattcaccaacagattcatctttacttcaacacttctacttcttcttcttctgtcggtgacggtgaaagtgacagtgtggctctttcacctttaactgttcattccttgaccaaaaactaaactgtaaatgtcgtga

SEQ ID NO: 49808 - DNA, 394 bp, Glycine max
  Clone ID: LIB3167-013-P1-K1-F4
ctctgtatcaagtcattgcgataatcatccataggcactgaagaaaatggcaaccatatccgctgctatcacaaccgcatcgatcacccgagcatgtctagtgcaaaaacgttctcttgggttctcatctagcgttcttggcttgccagcaacgggtaaggtgggaagagtgagttgctccatggaggaaaagccttcttctgtgaaggaaagcagctcaagcatgttgtggatgggggcatctttgatggcagcggccagcgccgcagccatgtcaggcccagccatggccttggtggatgagagacttagcactgaaggaaccgggctacccttcggcctcagcaacaaccttatcagttggatcctgttcagcgtcttcggactcatctgg

SEQ ID NO: 49809 - DNA, 391 bp, Glycine max
  Clone ID: LIB3167-013-P1-K1-F5
cgaagggctatatagcataaacatttgagtcttcattgcacaatgtcgacctcttccattaacgggtggtgcctctcttccatctccccagccaaaacctctctcaagaaggccacattaggcccttctgtcttcgcaaccgttagcactccttcttctccttcttcttcttcttcttcttccttcccttctctcattcaagacaggcctgtctttgctgcccctgcccccatcatcaccccaactgtgagagaggatatggcaaaggaatacgagcaagctattgaagaactccagaaattgttgagggagaagagtgaactcaaagccacagctgctgagaaagtggagcagataacagcttctctgggaacatcatcatctgatggca

SEQ ID NO: 49810 - DNA, 396 bp, Glycine max
  Clone ID: LIB3167-013-P1-K1-F6
cccacgcgtccggtcagagtgagaaagagagagagagagagagaaactgagagaaattcgcaaaccctaatttcggaaagatcggcgatggctgcctccaaggatcgcgagaacttcgtctacatcgccaagctcgccgaacaggccgagcgatacgaagagatggtggaatcaatgaagaacgttgcgaatctcgacgttgaactgactgtggaggagcggaatttactttctgttgggtacaagaatgtgattggtgctcggagagcatcgtggaggatcctgtcttccattgagcaaaaggaagaaacaaaagggaacgagttgaatgcgaagcggattaaggagtacaggcagaaggttgaattggagctttcaaacatctgtaatgatgtt

SEQ ID NO: 49811 - DNA, 390 bp, Glycine max
  Clone ID: LIB3167-013-P1-K1-G10
atttgaaattgatacagagctgagagcatcaaggaatcgaagaatagaagattcatttttttttctttttgatatggaagctgatgtttctattatttttgttgcgttttcaaaaccctaaattggagaaatcccaatttctccttctgtctttctgctttggatgtttttcaaccaaaaaattgtgcttttcaaatcttttgctctgatgggtacttcaaatcttctcttgtttttctctctgatgagcctgtgtgctatggcggcttccaaggtggtgcttattgggaataatatcactctctcctttgatgatattgaagctaattttgccccagcagtcaaaggttctggaaaatatggggtcttatatttggcagaaccactgga

SEQ ID NO: 49812 - DNA, 391 bp, Glycine max
  Clone ID: LIB3167-013-P1-K1-G11
ggcggcaacagggagagaagatgaagttcaatgcacgtgtgtcgagcagccgccgcaagagcctaaaggctcatttcacggcgccatcaagcgtgcggggggtgcttatgagcgcccctctgtcggcggagctgcagtctaagtgcaacgtgcggtcgatcccagtccggaaggaggacgaggtgcacgttatgcgaggaacatacaagggtcgcgaggggaaggtgactcatgtctaccgtcgaaagcgggtgattcacattgagcgcataacccgcgagaaggtgaacggctccaccgtcaacgttgggattcacccatccaaggttgtgctgaccaagctcatattggacaaggaccgtatggccattctcgatcgcaaggccaacgg

SEQ ID NO: 49813 - DNA, 395 bp, Glycine max
  Clone ID: LIB3167-013-P1-K1-G12
cccacgcgtccgcgttgaacttacataggactacattaatggcgaacaatttagatgcagactctaaaacagttaaccaacaagctttcttttatgctagtgaacgcgaagtccatcacaacgacatatttatattcggcatagataacaccgtactctctaatatcccatactatgaaaaacatggatatggggtggaggaatttaatgaaaccttatatgatgaatgggttaacaagggcgacgcaccggcattgccagagactcttaaaaattacaacaagctgttgtctcttggcttcaagattgtattcttgtcaggaagatatcttgacaaaatggccgtaacagaagcaaacctaaagaaggctggcttccacacatgggagcagtta

SEQ ID NO: 49814 - DNA, 392 bp, Glycine max
  Clone ID: LIB3167-013-P1-K1-G2
acccttccgggattgcaaatcccaatattaaatttcaaatgtgcttttccatgcagcttctttgcttctacaagcacccaccaccactgtttgtacacaatattaatgaaggcattcttaagtacaagaggtttttcacaaacccttcttcttcttctcgtggcatagctcatgcagtgaacgaagattcacaatcacagcagtatgattgtagacccagataaagccagagaagcactcaaaaagcttgatgagcaaatccagtctctctccaataaaaaacaagtctccactccaaaactcagagtttcggacatgaaacttcccacaaagccagccagtcgcaatgatgagaagttagaaatttcaaattcgctccttacaactttagc

SEQ ID NO: 49815 - DNA, 303 bp, Glycine max
  Clone ID: LIB3167-013-P1-K1-G3
tgcgactaagagttgctgcttcttccgccactcagcacttcgctccctctgtgcttcaccaaccatggccgaaatcgaagctaccgttccagatccctctcaaatcgacgtcaaacttttcaaccgctggagcttcgacgacgttgaggttactgatatgtctctggctgattacattggagtgtccccgtcaaagcatgctacatatgttcctcacactgctggtaggtactcagtgaagaagttcaaggaaggcgcagtgccccattgttgagagactcaccaactctctcatgatgcacg

SEQ ID NO: 49816 - DNA, 397 bp, Glycine max
  Clone ID: LIB3167-013-P1-K1-G4
tagacattgaagttgggcttggcccagcaggagagctcagatacccctcttatccacaaagccaaggatgggaatctcctggtattggccaatttcagtgctatgacaaatatttgaaggcagattttaaagcagctgtagcaagggctggccatcctgaatgggaactgccagatgacgcacgcaagtacaatgatgtcccagaatctactggattcttcaaatcaaatggcacgtatgtcactgagaaagggaagttcttcttgacctggtattctaacaaatcgctgaatcatggtgatcaaatactagatgaagccaacaaagctttcctgggctgtaaagtcaaattagcaatcaaagtatctggaattcactggtggtacaaagttgaaaa

SEQ ID NO: 49817 - DNA, 395 bp, Glycine max
  Clone ID: LIB3167-013-P1-K1-G5
ctgaaacatgacgttttgtacttgggagctctcggctcgctaaccccagctacttctccctcatccactcacaaaatgtgccaggccctctccgccccatcgcctccgtgtacggctcttctctccttccttttcttcctcctcacggtggtgggcccggtctcggtctcggcatggcggccgtggccctagaaaaacaatatgaacaccaccgattacgccttcggggactccaagaaatacgaggggtcctcggagttcgtgaagctgaggtaccacatgggaccggtcctcacgaccaacatcactgtccacaccatctggtacggcaagtgggagcggaaccagaagaagatcatccgcgagttcataaactcaatatccgcggcgaactc

SEQ ID NO: 49818 - DNA, 274 bp, Glycine max
  Clone ID: LIB3167-013-P1-K1-G6
gtgtgacttgctcagacgctcaagcgttctgttggatggatatccccaagtgcattgttgctcgtccattcagaaaacatgacaggcattctctatgagactggcgaacattccggccatgcggttgtcattaagtatgcaccttacggtggagacagcaggatgggcatggatgagtactctgctgagatattcatgcgcggtaagcacacacttgtgctgctcaacagtctccaggatacactgggggctgctcctattatctaagactagg

SEQ ID NO: 49819 - DNA, 368 bp, Glycine max
  Clone ID: LIB3167-013-P1-K1-G8
cccacgcgtccgcccacgcgtccgacaatggaagacataacagagggagtgaacaacatcaacatctctgattcgtataagaaaaatcgcattcaggtctctaacaccaagaagcccctcttcttctacgttaatctggccaagagatatatgcaacagcatgatgaggtcgagctctcagctctaggaatggctattgccacagtagtaactgttgctgaaattttgaaaaacaacagacttgctgttgaaaagaaaatcaggacatcaactgttgacataaaggatgactctagaggtcgacctgttcaaaaggccaagattgaaatagtactagggaagacagcaaacttcgatgagttgatggc

SEQ ID NO: 49820 - DNA, 338 bp, Glycine max
  Clone ID: LIB3167-013-P1-K1-G9
cggacgcgtggggtttgttgtgagctataagctagtttatcgtgaggagaatatgaagttgtttgttttctttgttgctgcagtagttttggtagcatggccatgccatggcgcaggctaccaaaggttccctctccgaatgaaaactggctatggtgagcgttcttcggaggtaaaatgcgcaagttttaggcttgctgtggaagcacacaacatccgagcctttaaaaccattcctgaagagtgcgttgaaccaacaaaggactacattaatggcgaacaatttagatcagactctaaaacaggtaaccaacacgctttctgatatgctacgtgaa

SEQ ID NO: 49821 - DNA, 296 bp, Glycine max
  Clone ID: LIB3167-013-P1-K1-H1
gtgatggagtgcgtattcggattggtgggtaatgggtttgcgatcgtggtggctgattcatcggcggtgcacagcatcctcgtccacaagtccaacgaggacaagatcatgctcctcgattcccacaaactcattgccgctagcggcgagcccggagacagggttcagttcacagagtacattcagaagaacgtcgccttgtatcagttccgtaacggcatccctcttaccaccgccgccgccgccaatttcacgcgtggcgaactcgccactgctctccgcaagaacccatactc

SEQ ID NO: 49822 - DNA, 266 bp, Glycine max
  Clone ID: LIB3167-013-P1-K1-H10
cctatgcgtatgtccgggcgttcaatcacaagcgattatcgtcatgcatcatgatgatagctacaagcacaagaagaacagttgcatttcgtgcgggaccaacggatcccgtcactgtcccaaaccatagtgtatccactttgctcagctctcactctgtcaactacccatgtgcataatacctcgcactccatttcgagcgatcagattatgaatatggtggacgaccgctattttattatacctttatcacatcaacattcatg

SEQ ID NO: 49823 - DNA, 384 bp, Glycine max
  unsure at all n locations
  Clone ID: LIB3167-013-P1-K1-H12
acgacgtcacgccctcgggtgtcttgatttgctattgcttgctccgaaaacataatttcatcatcgaatcaaatcaattttgaaggttcattataatggcggaagagataaccaagaacgacgtcggagtaacctccaaaaccaccagaagcagctccaggttctggcctcgttggattcccacttccaccgatcacatcatcgctgccgagaagcgccttctttccgtcgtcaagactggttatgttcaagagcatgttaacattggctctggtcctcctggctccaaagtgaggtggttccgttcatccagcaacgagccgcggtttattaacaccgttacatntgacagtaaaccccattctccaacgcttgtcatgattc

SEQ ID NO: 49824 - DNA, 376 bp, Glycine max
  Clone ID: LIB3167-013-P1-K1-H2
ccaaggcgtccgaccacctttaatttttaatattgacttccaactaacgctcggtgatgtgtaatttttaacgcatcaacccctaataataatcccccaaacagaacctttcccacccaatccaaacacaggcctaaacccccccaccatgatcatgagtgccgtgaatttgaacacatggccacgccccagcttcattttgaaccaaaccgccacaagaagatccagatcctccccaacctctcatttctttcacggcgtcaataagttaccgtcacccattatctacctcaccgttgccaaacgctcatttacgctctctgcggtgctgacgaaagaggacaccgtggagacggaagagaagccaccgattttc

SEQ ID NO: 49825 - DNA, 397 bp, Glycine max
  Clone ID: LIB3167-013-P1-K1-H5
cccacgcgtccgcccacgcgtccgaaaaaacccttagccaacacaaccatcatggccacctctgctattcagcaatcagcattcactggtcaaactgctctgaagcagctcaatgagttcgtccgcaagaccggtggcgccggcaaaggtcgcactaacatgcgccgcaccgtcaagagtgctcctcagagcatttggtatggccctgaccgtcccaagtacttgggtccattctcggagcagattccatcatacctgaccggagaattccctggtgactacggatgggacactgctggattatcagctgacccggaaaccttcgccaggaaccgggagctggaggtgattcacagcagatgggcaatgcttggtgcccttggctgcaccttcccag

SEQ ID NO: 49826 - DNA, 365 bp, Glycine max
  Clone ID: LIB3167-013-P1-K1-H6
gctgcctcgaattgctatggcttgcttcgaaacgctctggtatgatgcgagcggctggccctgaacctgagcgtggtcttgctccgctcatacaactaaccaccctaatggctatcttatgaaagggagaggagcaagctgcagatgacgtagccgatgccgtcgacaccaacaaccacgatgactccgacgactgcaacgacaccgggatcggcccgcacagctgacaacgtttggaggagcgtcttacatcctgggagcaactccgccacaaagaccatcggtgctcagatgtttgacaaaccactatccaacactcccactgtctatgacttgctgtacagaggggagaccagaagccggca

SEQ ID NO: 49827 - DNA, 394 bp, Glycine max
  Clone ID: LIB3167-013-P1-K1-H7
caacttctaacacatacactactctctctctctctcttattgtatggccgccaattccagtagccgagggatcaccgccttagggaagcgagtcgccaaccggatctggacttccaacgcacctcctctcacttcaaggaggggagcatacagtagcggctcagtgtacgacaagaaccctgatgatgagatccagtctgggcaggtcccagacgatgtgatccaggcggcaacacaatccggcaaatactgggccccacatccacagactggggtatttgggccccccggaggaggtgaccaaactgcttctgccattcactctgatgcgctggaggagaaggcctggtttcgccccaccagtctcgaggatttcgagaagcctcacaccctt

SEQ ID NO: 49828 - DNA, 306 bp, Glycine max
  Clone ID: LIB3167-013-P1-K1-H8
gatcgagataactagaaacagtgtgatgaaaatgaaggtccttgttttcttcgttgctacaattttggtagcatggcaatgccatgcgtacgatatgttccctctccgaatgaacactggctatggtgcccgtactccggaggtgaaatgcgcaagttggaggcttgctgtggaagcacacaacatctttggctttgagaccattcctgaagagtgcgttgaagcaacaaaggaatacatccatggcgaacaatatagatcagactccaaaacagttaaccaacaagcttacttttatgccagaga

SEQ ID NO: 49829 - DNA, 386 bp, Glycine max
  Clone ID: LIB3167-013-P1-K1-H9
cacttcgctagtaataagagaagagagagagagagagagagagagagagaggagaatgttgagtctctcagttgcttcaccttcttcttcaaccatttcctttctcccaaagccattcaatggcattcagctccgtcgcactgccacatgctccatcccacccacgaagcgcagctcatttgtgccggtggtggtgatgtctaagaggacggaggaattgaaggaaattagacaaatgactacggaacgaattaacgaagaggttgtcgaccttaagggcgagcttgtcatgcttcgccttcagaaatcggctcgcaacgagttcaagtccagcgatttcggtcgcatgcgcaagaggattgctcgcatgcttactgtgaagcggg

SEQ ID NO: 49830 - DNA, 343 bp, Glycine max
  Clone ID: LIB3167-017-P1-K1-A10
ccaatatattccattctctctgtgtatttccctacctctcccttcaagatgcagatcttcgtcaagaccctcaccggcaagaccatcacccttgaggtggaaagctctgacaccatcgacaacgtcaaggccaagatccaggacaaggaaggaattcctccggaccagcaacgtctcattttcgccggaaagcaacttgaggacggccgtacccttgctgactacaacattcagaaggagagtacttttcacctcgtcctccgtctccgtggtggcatgcagatcttcgttaagacactcaccggcaagaccataaccctagaggttgaaagcttcgacacca

SEQ ID NO: 49831 - DNA, 299 bp, Glycine max
  Clone ID: LIB3167-017-P1-K1-A11
aaatgttggaaatgcagttgcgggtgataactgctttcccttcttgatgactgagggtggaaatttgtgggagaactatagcttaaaggttaataaagcatgccaaaaccagtgatgagagtgaaaaaaagtttgacacttgtaagaggcaagaaaatttcacagccttttatcagatgatctcacattatgtaagcaagagctaactgatgagggtcgtttatgtatagagactgatgatgataaggtgatcaatcttattatatttaaaaaaaaaaaatacaatatatataaattat

SEQ ID NO: 49832 - DNA, 373 bp, Glycine max
  Clone ID: LIB3167-017-P1-K1-A12
cccacgcgtccgggagactggagttaaagaaggagacaaagttagcatgcactatgatcctatgattgctaagcttgtggtgtggggagaaaatcgtgctgctgccttggtcaaactcaaggatagtctgtcaaagtttcaggttgcaggtctgccaaccaatgtcaactttcttcaaaagcttgctaatcacagggcatttgcaaatggcaatgtggagactcattttattgataactacaaagaagacctctttgttgatgctaacaatacagtgtctgtgaaagaagcatatgaagctgctagacttaatgcattcctggtggccgcatgccttattgaaaaagagcattttatttttggctagaaatcc

SEQ ID NO: 49833 - DNA, 248 bp, Glycine max
  Clone ID: LIB3167-017-P1-K1-A2
aactcgcccttcttctttcggcgggctgtgttttgccgcggaggggatttcaactgaaaaaacactccgtgcagctataacacttactagagcaagatccagcataggtagcgaagcgcgcatgtgttatttaattgccccaattaaagggtacactacggcaaaaccgaaagcccttgcatgtgttagaggaatgtttcgagtgctgtgaatagatgaagatgtaaatgggggaatgagtaaccacc

SEQ ID NO: 49834 - DNA, 407 bp, Glycine max
  Clone ID: LIB3167-017-P1-K1-A3
cgacgtacgcacacctgagagctgccaatggtgtttccttccttctccctctccctcttcttccccattccgactctgcttcctaataaccttgtcttcagaaacaataccagggcaatccttaatcaacacaaatgcccattctccgaggaaagaccacgcttttcatgttgtgctctaaaacccacttcacaaaacaggatttttagaagggatttgatgctgttaggccttacttcgttatctccaacaatgccactttcagtgacacttgcggaagaagaaccaaaaatggcttcatttcttgacgaaataaatgcctattcttatatgtaccctgttgagttaccttccgataattttaccttcaaatggattgaatcccgaaagccagaacgatattcatc

SEQ ID NO: 49835 - DNA, 380 bp, Glycine max
  Clone ID: LIB3167-017-P1-K1-A4
cccacgcgtccgctcagcttgagttgtggaaggagaagagtaccggcaagtacgagaagaaagtttacgttttgcccaagcaccttgatgagaaggtggctgcacttcaccttggcaaacttggagctaagctcaccaagcttagcccggcccaggctgattacatcagtgtgcctgttgagggtccatacaagcctgctcattacaggtactaagtaattgagattatcaacggaaagtgagggaaagacaaaatcggttttatgaatcggattgattgtttaattttcctttttttgaatttttgttgttagacttttcagatttgaggtagaagaagtttagctttttttatttttaatttccgtagaatttcttgt

SEQ ID NO: 49836 - DNA, 381 bp, Glycine max
  unsure at all n locations
  Clone ID: LIB3167-017-P1-K1-A5
tcgnccacgcgtncgcccacgcgtccgcttttctcttaatccaaatatcatcatctgaaacgatggctgccatggcaaccacggccgtctcttcaaacccgaaactctcatttttccacggaaagcccgttacatattcttcccgcgtcgcacccaccaccaagttattctcatccaaacaaggcacaatctccatgtccctaacccaaccctcatacgaccttcaatccttcaaattccaacccatcaaagaatccatcgtctcacgcgaaatgacgcgcccttacatgaccgacatgataacctactgccacaccgacgtcgtaatcgttggagtcggttcggtggcgctcttcttgtgtgtactagatcagcaagaac

SEQ ID NO: 49837 - DNA, 393 bp, Glycine max
  Clone ID: LIB3167-017-P1-K1-A6
cccacgcgtccgatggagttgaagaaggtggcattggtgaaggtagctttgttgcttttcctgttagggttcagtgcaaccactgcagatgctactcgcttcgacccacgttccttcattactcaggtgctccccaacaattactatgtaaaaatcaaatccacagccactgcatgttgtgatctttgtctttgcacaaaatcaaaccctccccagtgccaatgtgtagatgggagcgagacaagctgccactcatgttgcaaaaattgcatttgcaataagaaatttcctcggacgtgtttttgtggagatataaccaacttctgctatgacaaatgtaacttaactgaagccaatttaagctcactagctaggaatatgaatgagcatgtt

SEQ ID NO: 49838 - DNA, 396 bp, Glycine max
  Clone ID: LIB3167-017-P1-K1-A7
cccacgcgtccgcccacgcgtccgattgtttgttgttgtaactcgttcttcttcttttgttggtctgtgtttgtgtttggtttgtctctcacctgaaaatgtcttgctgcggtggtaactgtggttgcggaagctcctgcaagtgcggcaacggctgcggaggctgcaagatgtacccagacttgagctacactgagtcaaccaccaccgagaccttggtcatgggagtggcacctgttaaggctcaatttgagggtgctgaaatgggtgtgcccgctgagaacgatggctgcaaatgtggaccaaactgcttctgcaacccctgcacttgcaagtgaggtgttgggagagcaagcttcaagcataaaatgcccttaattaggaataatgattaac

SEQ ID NO: 49839 - DNA, 366 bp, Glycine max
  Clone ID: LIB3167-017-P1-K1-A8
acgtgaatgctgacgagactgtcttgagacgcatgggggagctagggaacctggagagcgtgctttatttgttgatgatttgattgcaactggtggaacactctgtgcagctatggacttactagagcgagtgggagcagaggtagtggagtgcggatgtgtaattgaattgccagaattaaagggccgcgaactgctgaacgggaagcccttgcatgtgttagtggaatgttttgagtgctgtgaatagatgaagatgtagatgggggaatgcgtaaccaccaagtgggtactttcctatatggaaatcctctgcttcctcctttttaacgattaatgaaaatgaacgacttttcctattgagac

SEQ ID NO: 49840 - DNA, 247 bp, Glycine max
  Clone ID: LIB3167-017-P1-K1-A9
aacatatgtttgccttagttagtagtaacattttctcttttctagtaaatttggggaactttgattattattattgtgagttttacttttggggtatattggaggtggaaggagttgaatagataacgagacggaagctccttatgggatgagtaaacctctgatcttacagatgaaccaaaccttatacaccaatgataggcgttaaaattgtctgcctaatttaacgtactttacactcctgttt

SEQ ID NO: 49841 - DNA, 343 bp, Glycine max
  Clone ID: LIB3167-017-P1-K1-B1
accacaccaccatgtagagaacctaatctgtctttctcaaatcaccaagttgaaaatggggctgtgtttcacgaagctgttcagccggctctttgcgaagaacgagatgcgtattcttatggtgggtctcgacgccgccggtaagaccaccattctctacaaactcaagctaggagagatcgtcacaaccattcccaccattgggtttaatgttgaaactgtggaatacaagaacatcagcttcactgtctgggatgttggtggccacgacaagatccctcctctgtggagacactactttcacaatacccaacggcttatctttgtggttgatagcaatgac

SEQ ID NO: 49842 - DNA, 304 bp, Glycine max
  Clone ID: LIB3167-017-P1-K1-B10
cccacgcgtccgcccacgcgtccgtgatttcagtgagtgatcggtgttcacttgatctgatcataatcgtcagcgtcaggggaagaagatgccgatcagaaacatcgccgtcggaaggcctgaagaggcgactcaccccgacacgttgaaggcggctttggctgagttcatctcaaccttcatcttcgtgttcgccggctcaggctccggcatcgcctacaacaagctcaccgacaacggcgctgccacccctgccggccttatttccggctccattgcccatgcattcgtcctcttcgtcggc

SEQ ID NO: 49843 - DNA, 384 bp, Glycine max
  Clone ID: LIB3167-017-P1-K1-B11
ggagaatctgcttggccttttgagggttcgcgtgaagcgtggtgtcaaccttgccggtcgtgatgttcgaagcagcgacccttatgttgtcatcaagatgtacaaccagaaactaaagactcgtgtgattaaaaaggatgtgaatcctgagtggaatgaagaccttactctttctgttataaatccgaatcacaaaattaaactgactgtgtatgaccatgacacttttagcaaagatgacaaaatgggagatgcagaatttgacatctttccctttatagaggccttgaagatgaacttaactggccttccaaatggtactgtagtcacaagaatacaaccaagcaagcattattgcctggcagactagagctgtataactta

SEQ ID NO: 49844 - DNA, 65 bp, Glycine max
  Clone ID: LIB3167-017-P1-K1-B12
tcgcccacgcgtccgtccacgcgtccgttcattcgtccgaatttgttctatgaatttaacggcat

SEQ ID NO: 49845 - DNA, 396 bp, Glycine max
  Clone ID: LIB3167-017-P1-K1-B2
ggaaaacgtgaaacgctacgcccgcaactacgcctatttgttcattgttttcttcgcctgcactctgtataagatgccggttgctcttgtcgggttggtattgtgtttggcattgtgggatttcttcaagttttgtagccacagatggggattggagcagtatcccttgacgcgccagattttgattcgtgttgtgcaatgtgcaactgcggttattctaatcttttccaatgttcaaatggctctcttttgtgccatatgcgtcagctatgtaggaatgatacttcatgctggatttcgaaagttgacccctgtaaagcaaccttcagtgagcagaggtaggtagttgactaatcaatgaaactgtggtgaacgctttgttcagcacatcttact

SEQ ID NO: 49846 - DNA, 386 bp, Glycine max
  Clone ID: LIB3167-017-P1-K1-B3
gcagttgccaggctgagccatgtgattcaaactcgtctggttcaaatcctttggacaacttacttaccaaggatggtgattttgatgtagagcaatcatggccagtggtaacctcgtcgcccccatttttctgcgggtcgccgccgagtagagcagctaaccctttgattcacgatgctcgatttggggatgagaatttttccccgctctccccaccgtcgtgggtggtggttccggcggctgcgtcgggtctgccaccgtctccctctttctctgcaaggaaaggagggtgtgtccgagccaattttggtaacaatcctgctgtgagaattgaggggttcgattgccttgacaggacaggcgaaattgcaacatctctgctttgg

SEQ ID NO: 49847 - DNA, 369 bp, Glycine max
  Clone ID: LIB3167-017-P1-K1-B4
agtgattagagagggttctgggtacttttcctgaatttgcctccgtgggatcaaagatatttgggtcttttgtgagttttctgaagagcaaggatacaaacgatggaactgagcaagcattggttgctgaattgagtgccttggatgaacatctcaagacccatggtccatacattgctggggagaaagtcactgctgttgatctgagtttggcaccaaaactgtaccatcttgtggtagcactgggccacttcaagaattggaatattccagaaaggttggtacatgtgcacaattacactaagctgctgttctcccgagagtcatttgagataacaaagccttcaaaggagggaatttttttttgct

SEQ ID NO: 49848 - DNA, 308 bp, Glycine max
  Clone ID: LIB3167-017-P1-K1-B5
gttgatcgagataactagaaacagtgtggatgtataatgaaagtccttgttttcttctttgctagaattttggtagcatgggagggccatgcgtacgatatgttccctctccgaatgaacactggctatggtgcccgtactccggaggtgaaatgcgcaagttggaggcttgctgtggaagcacacaacatctttggctttgagaccattcctgaagagtgcgttgaagcaacaaaggaatacatccatggcgaacaatattgaacagactccaaaacagtttaaccaacaacgctttacttttatcg

SEQ ID NO: 49849 - DNA, 198 bp, Glycine max
  unsure at all n locations
  Clone ID: LIB3167-017-P1-K1-B6
cccacgcgtncgctgtaaaaaccgcaagatctttctatcactttgccacccttcattcataaacacttttcattattctatgagctcaaactcataacaatgaccactttttttctctactctcatttcctttcctccaagaactctattttccatgccccctttaaaggaaacaacaacaccaagcaattcactttt

SEQ ID NO: 49850 - DNA, 396 bp, Glycine max
  Clone ID: LIB3167-017-P1-K1-B7
cccacgcgtccgcgaaaatgtggtatagagtatacgggttttgaagaagaagcagttcaattgatcaactcagatttcagggacctaagtctagctgctaatagactcgcccatcatgccatcaaacttggtggcattggctttggagcctcttttttcggattgtttgctgccattgctgctatttatctgttgattttggatcgtacaaactggaaaacaaatattctcacagcactactcattccatacattttcttcagcttgccttcattaattttcgacgtcttcaggggagagcttggaaaatggattgctgcagttgctgttgtattacgccttttccttccaagacactttcctgattggctggaattgcctggtgctctgattctt

SEQ ID NO: 49851 - DNA, 397 bp, Glycine max
  Clone ID: LIB3167-017-P1-K1-B8
ctccaagttttttcttcacatttctctgtctttgatctgcacacacaacaacatgcctctaaaaaacatagagggataaaataaaaacatgaagaaatttgtactcaagttagatttgccagatgacaaggcaaagcagaaggccctgaaaacagtttcaacactttcagggattgatgccatctctatggacatgaaggagaagaaattaacagtgataggaacagttgatccagtgaatgttgtgagcaaactccgcaagtattggcagacagacatactctcagtatgctcagcaaaggagcccgagaagaaagaggagtcaaataaagaagagaagatagaggagccaaagaaagagggtgaagccaaaaaggaagaggagaaaaaggaagag

SEQ ID NO: 49852 - DNA, 393 bp, Glycine max
  Clone ID: LIB3167-017-P1-K1-B9
ggcagctgcttctcctatggcaagccaactcaagtccaccttcactaaaactcttgtagctcccaagggcctctctgcctcttcaccactccacctcctgccttctaagaggcaatttagcttcactgttagggccatccaatcagaaaagccaacctatcaagtgattcaaccaatcaacggtgatcccttcattggaagccttgaaaccccagttacatccagccccttgattgcatggtacttatcgaacctccccgcatacaggaccgcagtgagcccactactaagagggatcgaggtgggcctggcccatggctaccttctggtgggcccattcgtgaaggccgggcctctgaggaacaccgagatcgccgggcaagcgggctctct

SEQ ID NO: 49853 - DNA, 392 bp, Glycine max
  Clone ID: LIB3167-017-P1-K1-C1
ggaacatagaagcacgttggcgtgaacacgatgatgaggtcaaagatagtgttgtttggagactccataacggagcaatcgatccgagagaatggatggggtgttcctcttgccaatgcctattctcgcagggctgatatacttgttcgtggttatggtggatacaacactaagtgggctatgttcttactggaccatctcttccctctggactcaactaaaccacctattgctaccacaattttcttcggcgctaatgatgcagctttgttaggaagaaccagtgaaaggcaacatgtacctattgaagaattcaaagagaacctcagaaaatttgttcgacacttaaaggaatgctcaccaactatggtaattgtgcttattactccacc

SEQ ID NO: 49854 - DNA, 315 bp, Glycine max
  Clone ID: LIB3167-017-P1-K1-C10
gaaaatcctcaattttctgagcagccaatcactctctctctgtctctcgaaaattctcagtttgcagagaaaatctgaatcatgtcgtggcaagcgtatgtcgacgatcaccttctgtgtgacatcgaaggtaaccacctcactcacgctgctatcatcggccaagacggcagcgtttgggctcagagtaccgacttccctcagttcaaacctgaggagataactgccatcatgaatgactttaatgagcctggatcacttgctccaactggattgtatctcggtggcaccaaatatatggtcatccagggtgaa

SEQ ID NO: 49855 - DNA, 373 bp, Glycine max
  Clone ID: LIB3167-017-P1-K1-C11
cacatatttatttaatatggcaagaccctgcagaaactgaggagatatggaatttctggaatcctatcctatggacttttgaacactgcatactgtctcacaacgtttctttttgtgtggtatgtcaacaaatgtgcctcttagttagcttgcagttttgcttttctttttcttagagatctagtttgtataagaaattgtaagtctgtattgagttccccacttcttcctacttatctaccttctcttggcaagggtggttacttggagttagtcttcctcatgcctactattttttaggataccttattcacaatctctggatccttctaattattttgagggtactgtaactaagaatacactttatttt

SEQ ID NO: 49856 - DNA, 392 bp, Glycine max
  Clone ID: LIB3167-017-P1-K1-C12
cttcaatcttttctctcttctgccctctgcacctcccctcacacccttcctcattcgcagatataggaggtgaagatgtcgaccccggcaaggaagagactgatgagggattttaaaagattgcaacaagatcctcctgctggcatcagtggggctccccaagacaataatattatgctttggaatgctgttatctttggaccagatgacaccccttgggatggaggtacgtttaagttgacacttcagtttacagaggattatcctaataaaccacctactgtgcgttttgtttctcgaatgtttcatcctaacatttatgcggatggcagtatatgcttggacattttacagaatcagtggagccctatttatgacgtagctgcaattct

SEQ ID NO: 49857 - DNA, 397 bp, Glycine max
  Clone ID: LIB3167-017-P1-K1-C2
cccacgcgtccgcccacgcgtccggttttctgtgtcaccggaactcgtttctttcaaaacacttcaaacatctcgaacgctctctttccggcaactaggttaaagttcatcaatggcaggtcgcggcaaaaccctaggatctagcgccgccaagaaggctacctcaaggagcagcaaagccggcctccaattccccgtcggccgtatcgcccgtttcctcaaggccggaaaatacgctgagcgtgtcggcgccggcgcccctgtctacctcgccgccgtactcgaatatctcgcggctgaggttttggaattggctggaaacgctgcgagagacaacaagaagactcgaattgtgccgcgccacattcaattggcggtgaggaacgacgaggagttg

SEQ ID NO: 49858 - DNA, 391 bp, Glycine max
  Clone ID: LIB3167-017-P1-K1-C3
gtagttttggtagcatggccatgccatggcgcatgctaccaaaggttccctctccgaatgaaaactggctatggtgagcgttcttcggaggtaaaatgcgcaagttttaggcttgctgtggaagcacacaacatccgagcctttaaaaccattcctgaagagtgcgttgaaccaacaaaggactacattaatggcgaacaatttagatcagactctaaaacagttaaccaacaagctttcttttatgctagtgaacgcgaagtccatcacaacgacatatttatattcggcatagataacaccgtactctctaatatcccatactatgaaaaacatggatatggggtggaggaatttaatgaaaccttatatgatgaatgggttaacaagg

SEQ ID NO: 49859 - DNA, 242 bp, Glycine max
  Clone ID: LIB3167-017-P1-K1-C6
ctcctttgacgacggccctctggagaccgaggtcgaaatcgccgctgcctacgaggagctctacggccccggctacagcggggtctcggtcctcggcaacgacctgtacgtgatggacgcgaaggtgaagaaagagaccgggttcgggtccggcgccaagaaggagaaggtgagggacgggttcgaggagagggtggtgcaggtcacgagggtcaccaaggtcgtcaagggagggaaacagc

SEQ ID NO: 49860 - DNA, 130 bp, Glycine max
  Clone ID: LIB3167-017-P1-K1-C7
cccacgcttccgttcttttcattcccttcaatgcccttacaccccatggggggggctataacacacactttcagggaggagaacactgtgagctgcagtatcatgtaaaatattattattagtggggact

SEQ ID NO: 49861 - DNA, 285 bp, Glycine max
  unsure at all n locations
  Clone ID: LIB3167-017-P1-K1-C8
acactttctatctcatttccaatctcattttcgntcgggtcaaacactctcatggcatcagacaagaagattgggatcggcatcaaccgatttggaaggattggccgtttggtggccagggttgctcttcagaggaatgacgttgaacttgttgctgtcaaccatcctttcatcaccactgattacatgacatacatgttcaagtactacaccgctcatcggcagtggaagcattttgatgtgaagttgaacgactctcacaccctttttttctgtgagaattcc

SEQ ID NO: 49862 - DNA, 134 bp, Glycine max
  Clone ID: LIB3167-017-P1-K1-C9
gttgatatatgtttgagacatggcggtgttatgtttttggatgatatattgttttctgacaattaaaaacatgtggtatgcttgtaattttgaaagacatttataaggtttggattctattgtctttgggctgg

SEQ ID NO: 49863 - DNA, 199 bp, Glycine max
  Clone ID: LIB3167-017-P1-K1-D1
cccacgcgtccgggctaacccacccccagttcgtccatggtttcgcttagcctcaattcggggtagcccacccccacccccaccccctgcacctgcccctgcccaagagccacgcctgccagcatttacaactgcttcagcaccatcatcaccacagattcagccaactcaaccagcttcccagcctcaataaccaccc

SEQ ID NO: 49864 - DNA, 108 bp, Glycine max
  unsure at all n locations
  Clone ID: LIB3167-017-P1-K1-D10
ccggaanggaaggnccgcgccgacccacgcgtccgattttttttgcaactacattatattcaatttacacaacacaacacagattaatggggaggttgtttgtcgcga

SEQ ID NO: 49865 - DNA, 336 bp, Glycine max
  Clone ID: LIB3167-017-P1-K1-D11
agcagatcaatctctctctctctttcaaccataatagtcatgggtttgaaggaggattttgagcagtatgctgagaaagcaaagactttgccaccgactcaatcaaacgaagacttgcttatcctttatggattgtacaaacaggccaccgttggacctgtcaacaccagccgtcctggaatgttcaacatgagggacagagctaaatgggatgcatggaaggctgttgaagggaaatccaaggacgaagcattgggcgattacatcattaaggcgaaacagctgctggaagctgcttgcgttgactgttttataacattgccatgcctttgcttt

SEQ ID NO: 49866 - DNA, 398 bp, Glycine max
  Clone ID: LIB3167-017-P1-K1-D2
gaggaagccgtagattccaacgctttctctctgagtcacacacacacacacattgcagcaacaacaacaaccacacccgattccatgagtcgctacgatcccaatcccttcgacgaagaaccggtcgaggttaatcccttcgcggatggagcagctaaaggaaaaggctcagggcaatcaagttatagtggaggtgcattttatactactaacactggaagtgttccctcctcaaactcaaggctgtcacccctttcaccagagccttatgatcgtggggcaactattgacatccccctaaataatgcaaaggacgcaaaagcaaaggagaaggaactttaagctaaagaggctgaattgaaaagaaaggaacaggaactaaaacgaacggaagatgc

SEQ ID NO: 49867 - DNA, 176 bp, Glycine max
  Clone ID: LIB3167-017-P1-K1-D3
aatcctattcctcccggaccctgtatagtatcagtatgaacgcgatatgatgattatcgagagggagagactcctcattgggaggcagatatgagatacttccttctttatctttcttcacagcacctaacaaaatacttgacaaagcatgggcgccgactactacaagatttttc

SEQ ID NO: 49868 - DNA, 322 bp, Glycine max
  Clone ID: LIB3167-017-P1-K1-D5
ttcagccacagttggaaaaaaaaaaaaagttgttcgagatggcacgtacgaagcaaactgctcgtaagtccacaggaggaaaggcacctaggaagcagctcgcaaccaaggctgcacgtaagtctgcaccaactactggtggtgtgaagaagccacatcgttatcgtcctggtaccgttgctcttcgtgagattaggaaataccagaagagtaccgagcttttgatcaggaagctccccttccagaggctggtttgtgaaattgctcacgacttcaagactgatctgtgtttccagagccatgctgtgcttgcattgcaaga

SEQ ID NO: 49869 - DNA, 250 bp, Glycine max
  Clone ID: LIB3167-017-P1-K1-D6
agcagatctttcaagaatggcacaaattttcattcatggcacaagggatacaaacccttaatcccaattccaatttccataaaccccaagttcctaaatcttcaagttttcttgtttttggatctaaaaaactgaaaaattcagcaaattctatgttggttttgaaaaaagattcaatttttatgcaaaagttttgttcctttaggatttcagcatcagtggttacagcctgcatgctttacagtgcaag

SEQ ID NO: 49870 - DNA, 215 bp, Glycine max
  Clone ID: LIB3167-017-P1-K1-D7
aagaaatttaagtgaggagctagtgaatgatgatgaagtctgctatgtgtgcagcgggggttgtagcacttcttcttctggcggacgtggggcccatggctgaggctgtgacatgcaccccaacagagctgattccgtgtcttccaccaattacttccggcgctaaaccttccaatgcttgttgcacgaagctcaaccaccaaaaaccatgctta

SEQ ID NO: 49871 - DNA, 349 bp, Glycine max
  Clone ID: LIB3167-017-P1-K1-D8
gtttttcattgtgcattattcaatggctttccacagcagctctatccggaaccatggtgagcaccttcttcatgaggaagcaacctatgacgaccaagagcctaaagacatttcccaacgctctttttggtctgaaaggtggacgaggtggttgtgtaacttgcatggccttgtacaaggtgaagctcataaccccagaaggagaattggagtttgaatgtccacatgatgtttttattgatgacaacgcctaggaagaaggcattgaattttcctactccatcagggctggtttttgcgctttcatgctttgggaaaatttgaaaggtgactttgtctatttatatag

SEQ ID NO: 49872 - DNA, 343 bp, Glycine max
  Clone ID: LIB3167-017-P1-K1-D9
gggtttacagagaagctaagaggcgcagtcgtagcaaaagctcgtggaattgctagcagtggcgaggatcaaggtttacgagctgaggcagaagacgaaggctgatctgctgaatcaactgaaggacctgaaggcggagcttgccttgcttcgtgttgctaaggtcaccggtggtgcccctaacaagctttccaagataaaggtggtgaggttgaacattgcccacgttttgacggtgatttttcagaagcagaacgctgcgttgagggatgcctacaagaataagaagttcttgcctcttgatctccgccctaagatgaccagcgctattctcacgaggctt

SEQ ID NO: 49873 - DNA, 396 bp, Glycine max
  Clone ID: LIB3167-017-P1-K1-E1
ctgcactattgacccaattagcgatagcaagtacgagcatatccttgagagttttgcagagaaactagtgaaagaaaggccttcaccatcatttgttatggctacttctaacagttcttttctgcacgctgatgcaccggctcctccaccggccttgcttccatcttggctttccaattccaatggcactgcacctgtgaggccaccttccccttctgtgactcttagtctttctccctcgacggtggcagcgcctcctccatggttgcagccccctgtgagaggaccggacaatgctgctcctcttgttttggggaatgtggcgcctcacggggcagttttagcatttggtgagaacatggtgatgtctgagttggtggagtgcttcaaggagtt

SEQ ID NO: 49874 - DNA, 155 bp, Glycine max
  Clone ID: LIB3167-017-P1-K1-E10
cccacgcgtccgctctttctctttcttttactgcttcttcactttctctcgtttcaatcgaaaaaaatcatgggcagaaaattttttgtcggtggcaactggaaatgcaatgggaccactgaggaggtgaagaagattgttactactttaaatga

SEQ ID NO: 49875 - DNA, 273 bp, Glycine max
  Clone ID: LIB3167-017-P1-K1-E11
cccacgcgtccgtccacgcgttctgctgttgactccacttattcaccaatttaggctatatgcaatcaaatttgcaaaacccaagtttgaaaccttgataaatagttgttccagattggcatcaaaagtaagaaggtgcacaattcgaccttctccactataatttgcaatgacatatatcaaacagtgataccaactaggagtgacatgcagcaaattcacactgcaaaatttacaattaagagtctcattgttgtaggtggtagagaattt

SEQ ID NO: 49876 - DNA, 298 bp, Glycine max
  Clone ID: LIB3167-017-P1-K1-E12
aaaaaaaaaaaaaaaaaaaaaaatttatttaaaaaaaaaaaaaaaaaaaaaaaaaaaaaaaaaaaaaaaaaaaaaaaaaaaaaaaaaaaaaaaaaaaaaaaaaaaaaaaaaaaaaaaaaaaaaaaaaaaaaaaaaattaaaaaaaaatattaataaaaataaaaatataatataactatgttaatatattataaataaaatttattatattaaaatattacataatattatgggggggttcttaatgaactccctttttaattccttttttgtttttttttgtatatttgttattttt

SEQ ID NO: 49877 - DNA, 393 bp, Glycine max
  Clone ID: LIB3167-017-P1-K1-E2
cgattttgttgattccatcaaacagaatatgaatgtaaaatacgtttacatgtggcatactttaactggttactggggaggtgtactcccatcatcagatgcattgaaaaaatataatccaaagattttatatccaattcagtcacctggaaccacagggaaccttagagatgtagccatggacatctactttgactccatctacaccacagcttgcaaggtaactgtgggaatcattgtaaaagtcatatagtttttctgggtcaatgattcccactccatatttttccaagggacagcaggctaaaagcccttgctggagtatcaggattttgtcaggtaagcataccgctagggatgtataataacctttccctattaatttctctggtg

SEQ ID NO: 49878 - DNA, 378 bp, Glycine max
  unsure at all n locations
  Clone ID: LIB3167-017-P1-K1-E3
ntccactgctgcatctcagaatcgggactccattttcctcactacatcgnccctattagcacactagattttgccaaaaagatcaaattttgaagcaattgtttttgtgggcaacattcattctttcctatccctcgaaaaatcaattttcggcttcgggctcaatcggaaatggagaaggtgatgaacattctgaagccgaagccaaatccacagcaactattgagggattggcagcgcacgctttgtcaagagtgtcgcaacattgagcgccaaattcgcgatatacaaagagaagaaaataatgtgcagaaggctattagagaagctgcaatgaggaatgacatgggctctttcaaggctctttgcaaggaactt

SEQ ID NO: 49879 - DNA, 170 bp, Glycine max
  Clone ID: LIB3167-017-P1-K1-E4
aactttcaactgaccactaattactcatttttttttggccacttcgctctctttctccatttttcccaaaaccactgccacaacctcagccttccgattaaaagtctccgccatggctaccaccatcggccgccccttctaccaaggtgggttcccgcctccattgtctg

SEQ ID NO: 49880 - DNA, 230 bp, Glycine max
  Clone ID: LIB3167-017-P1-K1-E5
gttagtgagagaaagttgtctgtctttgttttttatccctatggcgcgctttgcaatcgaccgcgcttatggccaacagtcacctccctcgaagaatcattaaggaaacgcagcgtttgctcagtgagccagcgcctggaattagtgcgtcccctttcgaggacagtatgcggcattacaatgcgatgatccttggaccgactcagttgtcatatgaagggggagttttt

SEQ ID NO: 49881 - DNA, 400 bp, Glycine max
  Clone ID: LIB3167-017-P1-K1-E6
cccacgcgtccgaactttttagtcccttttagttaaaaaaaaaaaaaaatacatctttgagtccttccctcaatatggcattaatgggatgtgcgactgacagatgttttgcaatttgtggtggtgtttagccaccagaaattgattttagcatttttgaacatcaaacacaatttctagaatcttgtaaagaaaaaaaactgcaatgcattccaaaatcccaatttccagatttacacaaatctgttttctagattcacaacaatttgaaactcccttgtgaaaccataaaacccccatcagattccacaaattcaacacttccaaatgtttccacagtatgctctttgcaatcaacccctcatcactcatgactacgatctggagccccttcctttta

SEQ ID NO: 49882 - DNA, 136 bp, Glycine max
  Clone ID: LIB3167-017-P1-K1-E7
agaaagtagcaaagatgacaggtttgtttagtctaaggaaggggcaaaagacaaaggggccagttttgttaatgcctaagccttcattggacttcaatactataaacattccttgtataggcactgctacactcac

SEQ ID NO: 49883 - DNA, 388 bp, Glycine max
  Clone ID: LIB3167-017-P1-K1-E8
gctggtttgaatccaaatgtcattaagattattgaggagttcccactaagtagcaagctagatactcaagcctatggtgatcatacctgtataataacaaaagagcatttggagcctaacttaggtggtctcactgttgagcaggctattcaaaacaagaagttgttcatcttagatcaccatgactatctcattccatatttgaggaaaataaatgcaaataccacaaagacttatgctacaagaaccatatttttcttgaaaaatgatggaactttgacgccattggccattgagttaagtaagccacatttctcacggtgaagcatatgctcctgttagagaagtctacttgccttttattgaaagattttgaagcatttctttt

SEQ ID NO: 49884 - DNA, 411 bp, Glycine max
  Clone ID: LIB3167-017-P1-K1-E9
aacccggcccgacccacgcgtccggctcaggcaatctctcttggcattgctctcgccttgctgaaggtgagcgaagatcatagagtacctttgagacaggaaggacttcttacaagagattccagagtggttgagaggaagaaagttggtctcaagaaagctcgtaaagcccctcaatattccaagcgttgaggttgggatgttacatgtatggtctgtcttttctttcctcctggtgtctctggaaatgagttacatttggaactattgattgttttcatttgtagttgtaggtttttcgggttaggaaaagtaaagagaaattgaaaaatatccgaaggcgtatgtattcagaatcctgctccctgttttcccatctattgtttccttgatctgtatggaattgggaat

SEQ ID NO: 49885 - DNA, 268 bp, Glycine max
  Clone ID: LIB3167-017-P1-K1-F10
cccacgcgtccgcttaactccaattctttaataaaattcctattcttcttctcatttcaactctttgcaattgcgatctgtcattccttttttttactcttggtaagcgtagttcggtgttggagaaccagcttccagttccagaatactgctgaacagagttcggcttcgctttattgggactcagttgtgtttctactaggttatcttctttgaattgcaaatgaatgatcgttgaaaaaccttgaagaaggtgtggagaacgatc

SEQ ID NO: 49886 - DNA, 385 bp, Glycine max
  Clone ID: LIB3167-017-P1-K1-F11
cttgggcaacccaaacctgatccatgctcaaagcatccttgccatctgggctgttcaggttgtgctcatgggttttgttgaaggttacagagttggtggaggaccccttggtgaaggacttgaccctatctaccctggtggtgcatttgaccctcttggtctggctgatgaccctgatgcattcgctgagttgaaggtcaaggaactcaagaacggtcgcttggctatgttctccatgtttggtttctttgttcaggccattgtcactggcaagggccctattcagaacctttacgaccatgttgctgatcctgttgccaacaatgcttgggcttatgccactaactttgtccctggacaatgagcattgcaattcaatgcaatc

SEQ ID NO: 49887 - DNA, 382 bp, Glycine max
  Clone ID: LIB3167-017-P1-K1-F12
cccacgcgtccgcccacgcgtccttcctttcgtccgacgatccagcactacagtttgcgcagttgctgagcctgataggcctctgtggttcccaggcagcacccctcctccatggctagatggcagtttgccaggagattttggctttgatcctctaggtcttgcatctgatcctgagagcctgagatggaatgtccaagcagagcttgtgcactgcagatgggccatgttgggagctgctggcattttcatcccagaattcctcacaaagattggtatcctgaacaccccttcatggcacactgctggagagttggagtacttcacataccccaccacactctttatttttgagcttttttttattcttggtcctattgtt

SEQ ID NO: 49888 - DNA, 396 bp, Glycine max
  Clone ID: LIB3167-017-P1-K1-F2
cccacgcgtccggagttaggaaaatggggaagaagaagaagagaagtagggtttccgaagacgaggaaatcgaatccgataccaaccccttcgataaaaacgaaaactctctctatcaggttcttggtgtggagaaaacagcatctcaacaggaaataaagaaggcatactacaagttggcattgaggctgcatcctgataagaaccctggtgatgaggaagctaaagcaaagtttcagcaattgcaaaacgttattgctattcttggggatgaagaaaaacgggccgtttatgatcagactggttttgttgatgatgctgaacttgcaggggatgttgttcagaatcttaaagaatatttcagagcaatgtacaagaaggtcactgaagctgata

SEQ ID NO: 49889 - DNA, 268 bp, Glycine max
  Clone ID: LIB3167-017-P1-K1-F3
atccgtatcatcggattcgacaacgtttttcaattgcagtgcatcagcttcatcgcctacaagcccccaggcttctaagtgtgagaaaatttgcaaagcatttgtagccgccaccccactttgtttgtttgtacttaaactacattcccatttgtttttgctttttgagatttcatcatcctgtatttttggtttctgttttcggactttaatggaaattaatggatgagaactaatgaataagctattgtggtgtgttgctttgttt

SEQ ID NO: 49890 - DNA, 155 bp, Glycine max
  Clone ID: LIB3167-017-P1-K1-F4
gtacgcccagcgtgtctgtaccggcgcttttgtttacttggccgcagttctcgagtagctagctttttatgtgcttgaggtggctgggaatgctgtacgtgacaacaagaagaacaggattattctcagacatgtgctatcggctgtgaggaacc

SEQ ID NO: 49891 - DNA, 364 bp, Glycine max
  Clone ID: LIB3167-017-P1-K1-F5
gagaagagaagagaagaggccggggaggtgacttgaaggtcaaccatcgaccactctgtttctgtaattcttcccacaaacatgtcacgcgccgccgcgtcgttcggaatcctcctttgtctgctgctcctcgtcgccgccgtcaactgctccgatcagggaaactgcagcaccacatgcattgtggagcaatgcgacacgatcggaatcaaatactgcaagtattgcggggtagggtattggggttgctcctttgttcacgccattgatactcgcaagggccctatttagaacctttacaaccatgctgctgatcctgttgcaacaatgcttgggcttttgccacttactttgtccctggaca

SEQ ID NO: 49892 - DNA, 355 bp, Glycine max
  Clone ID: LIB3167-017-P1-K1-F6
cggacgcgtgggcttgccaaattcaagtgttaattattcatcaaccgcttggtggtgctcaaggagggcaaactgacatagatattcaggctaatgaaatgctgcatcataaggcaaatctgaatggatatctcgcctatcacactggccaaagtttagacaagatcaaccaggatacagaccgtgactttttcatgagtgcaaaagaagccaaggaatatggactcatagatggtgtcattatgaatcctctcaaagctctccagccattataggctgcaccagaaagtaaagaccgcgctagtgtttgaacatgagaatgttgcactttaatttccaaggcataaaaaatcat

SEQ ID NO: 49893 - DNA, 306 bp, Glycine max
  Clone ID: LIB3167-017-P1-K1-F7
gtcatcaacccgcgccttgccggtctgtttatacgtggcggacgcgtagcgcgttcggtacctgcactctaaaaggcgtcacggtgccggaagaccactcgccttttatgatcgacgaatatccgattatcgctgccatcgtcaacttcctggaaggggcgaccgagatgaacggtcttgaagaacttcaaatctaggaaagcgaccgtctattggacgttatcaatggcctgaagtataatggccgtggattgtgataagggcaagactgctgctcgtttatgcgtggtacgcccttgatatgta

SEQ ID NO: 49894 - DNA, 377 bp, Glycine max
  Clone ID: LIB3167-017-P1-K1-F8
cccacgcgtccgcccacgcgtccgtccattcgtccgatttattgcatttgtatcaaccgaggcagagacagatcagccggcaattgaactgaaacctggaattgaccttctaggacctgttgatgagatattttttgatatctatgacagatatgaaccagtcaacgaacccactttggacaactgctttatatcaacaagttatgatgctactactcactttgagtcgactgtggatgacgtttttaacatgtatacattgataactggaaaggttattgacctcagtgtggatcttattgcttctagttgtttgcataagtagtaaagaaaacttcgtgatgatctgttgctgttgggttccttatgatggactt

SEQ ID NO: 49895 - DNA, 282 bp, Glycine max
  Clone ID: LIB3167-017-P1-K1-F9
cccacgcgtccgcccactcgtccgcttctcaagattctcacaaacaactcttgagaaagaaagaatggctgccaacacattgatgagttctgccatctcagccttcccatctctcctttcctcctcaaaatccagatttgccgcagcagttcctctttccagctttgttgtcaccaatgcctcttcttcttgcttttccatgagtgctgattggatgcctggccagcctagacccccctaccttgatggcttatcacctggtgactttggattccaccctct

SEQ ID NO: 49896 - DNA, 400 bp, Glycine max
  unsure at all n locations
  Clone ID: LIB3167-017-P1-K1-G1
cgataaaccgcggtggtgnncctctcttccatctctcccatctcaaaacctctctcaggaaggccacattacgcccttccgtcttcgcaacccttaacactccttcttctccttcctcttcatcttccttcccctctctcattcaagacaggcctgtttttgctgcccctgcccccatcatcaccccaactgtgagagaggatatggcaaaggaatacgagaaagctattgaagaacttcagaaattgttgagggagaagagtgaactcaaagcgacagctgctgaaaaagtggagcagataacagcttctctagggacatcatcatctgatggcatcccatcatcagaagcctcagacaggatcaaagctggtttcattcacttcaagaaggagaaata

SEQ ID NO: 49897 - DNA, 368 bp, Glycine max
  Clone ID: LIB3167-017-P1-K1-G10
cttcctcttcgatcatcacctcttcacattgccgccgaagttcgacccctcccagatagtcgacgtcttcgtccgcgtgaccggcggcgaagtcggcgcggcgagttccctggccccgaagatcggtcccctcggtctctcccccaagaagatcggagaagacatcgccaaagaaaccgccaaggactggaagggcctccgcgtcaccgtcaagctcaccgttcagaatcgtcaggcgaaggtcacggtggtcccctccgccgccgccctcgttatcaaggccctcaaggagcccgagcgcgaccgcaagaagaccaagaacatcaagcacaacggcaacatttcgttcgatgacgtcatcgagatcg

SEQ ID NO: 49898 - DNA, 132 bp, Glycine max
  Clone ID: LIB3167-017-P1-K1-G11
attttttaagtgagtcacttggctcctttaatagcagtagctgaatggtttctaagaaaaaatttcttgtctaatcttgtgtaatcgaactacatggtttactcttaatgtgcttgacctatcgatgattcc

SEQ ID NO: 49899 - DNA, 372 bp, Glycine max
  Clone ID: LIB3167-017-P1-K1-G12
gtcgatgtcactagtggcattcgcagctccaaattgcaatttctcgcgcgaactttgcgaggtctagggttccccgactgccatggaccacgccggattaacctacggacaggttctgaggagggacatcccatgggagacctacatgttcaccacgctaatctgaggccccaaccttcaattattaaggtgctacaatcatctgccacagagtcacagaggacatttgctagacgattatggagcctcttatgttcgcgtgtatggtcgggttttgcgtgacattcttaaggaagataccgtggagatagtttggcactttatatatgaaatgcttgttgcaaaccctaacagagcatgactgttttatga

SEQ ID NO: 49900 - DNA, 290 bp, Glycine max
  unsure at all n locations
  Clone ID: LIB3167-017-P1-K1-G2
gaaaancggcccgacccacgcgtncgaccacgcgtncggctataagctagattatcgtgtaggagaatatgaagtagtttgttttctttgctgctgcagtagtttgggtagcatggccatgccatggcgcatgctaccaaaggttccctctccgaatgaaaactggctatggtgagcgttcttccgaggtaaaatgcgcaagttttacgcttgctgtggaagcacacaacatccgagcctttaaaaccattcctgaagagtgcgttgaaccaacaaaggactacatttat

SEQ ID NO: 49901 - DNA, 322 bp, Glycine max
  unsure at all n locations
  Clone ID: LIB3167-017-P1-K1-G3
ggccaaatattccattctctctgcgtatttccctacctctccctttaagtatgcagatcttcgncaagaccctcaccggcgagaccatcacccttgaggtggaaagctctgacaccatcgacaacgtcaaggccaagatccaggacaaggaaagaatccccccggaccagcaacgtctcattttcgccggaaagcaacttgaggacggcccgacccttgctgactacaacattcagaaagagagtactcttcacctcgtcctccgtctccgtggtggcatgcaaatcttcgttaagacacttacccgcaagaccataaccct

SEQ ID NO: 49902 - DNA, 249 bp, Glycine max
  Clone ID: LIB3167-017-P1-K1-G5
acggtttctgcactctcttcctcccatcgtattcctttatctgcgcaggagaagctgatacggaaaggattttgctagtatggcgttgggcgaatactcaagaagcgacgtcaactggagttaacccacaattatcaccatcttcaactatagggacacctctcttctggattggtgttggtgttgggctctttgcactgctttcagtggtagcttcaagattaaagaaatatgcaatgttacacgctt

SEQ ID NO: 49903 - DNA, 402 bp, Glycine max
  unsure at all n locations
  Clone ID: LIB3167-017-P1-K1-G6
accacgcgtccgcccacgcgtncgccacgcgtccgctaatgagctctacaaatacccatcacctccacccccaggttacaagtacaagtcccctcgggcatactactaccactctccaccacctcctaagcactctcctccacctccctactactaccactctcttccacctcctaagcattcacctcctcctccatactactaccactctccaccaccaccatataagtacccatctccaccacccccagtttacaaatacaagtctcctcctcctcctgttcattcaccacctcccccagtttacatctatgcatcccctcctcctccatatcactactaggtagcggttttgcgtagcttcgcacggtttaagcttcttcataaaacctacattttcat

SEQ ID NO: 49904 - DNA, 383 bp, Glycine max
  Clone ID: LIB3167-017-P1-K1-G7
cccacgcgtccgatcgtcttctgcttcattgaaggagagcttgttattctctatcaacagggaaaatgtcaggtgaagaggttgttgttgcagctgagccagctgctgccatcccaggcgagcctatggatatcatgactgccttgcaacttgtgctcagaaaatctctggcttatggtggtcttgcacgaggccttcacgaaggggcaaaagtgattgagaagcatgctgcacaactctgtgttctagcagaagactgtgaccagcctgactatgttaaactggttaacgccctttgtgcagagcacaatgttagcctgctgacagttccgagtgcaaagacccttggagaatgggctggtttgtgcaatattgatttccaa

SEQ ID NO: 49905 - DNA, 329 bp, Glycine max
  Clone ID: LIB3167-017-P1-K1-G9
atttggtcactgacctatcttggtagagttttgaagtttaaaccttcaaattaatcaggccattttaatttgcctttagattctgagtcactgctgctatggcgctacgcgtacttcttgtgttggggatgttgctgatgttgtgccttgttaaggtttcatctgatccaaagatagaagaagaaatactggaagcagaagaagaactgcagtttcccgataacgagccacttatcgtgagagacgccaacagaaggctaatgcaagatatggattgtggtggcttgtgcaagaccaggtgcagcgcacattctaggcccaacttgtgc

SEQ ID NO: 49906 - DNA, 372 bp, Glycine max
  Clone ID: LIB3167-017-P1-K1-H1
ggcctagctgttttctcaatgagaaagccttcatctctgcaaagcgcacttttgcgctttggggttcccttgttgcttgttatcaccttctgttatgctacttctactgctgcagcaacaactcaagtttcagggaatgaagagctgccaaagacaaacctaaatgggcatgatgaagaagcaaaattcggattttttcatcataaaccaatattcaagaaacatattccaattccagtatataaacctgtaccaaagccatttccagtgtataaacctataccaaagccagttccagttccagtgtacaagcctattccaaagccagtgtataagcctatttcaaagccagttccagtgtacaagcctata

SEQ ID NO: 49907 - DNA, 384 bp, Glycine max
  Clone ID: LIB3167-017-P1-K1-H10
gttggtttcaagcatgttcgggtgtggagtggtgatggcggtgtctcaagcattgggaattggaaggagaagcgatggtggattgacaatagtgtgttcgtctaggactgagatgaaagtgacggtgcatcacatgaagactcggtctcggaagacgcatgcatgggatagaaaccgcaagcccaccgtctactatccactcccttcttttcctcctgattggaccctcgttatttccgttgactcttgttctgttcccgatacgccttcgcctccaatttcctctgcctagttactatattcctactctttttcgttttcatgtccttcttatctttaatccctgcagcctttctttcattgttttcatttcaaatcaaacct

SEQ ID NO: 49908 - DNA, 378 bp, Glycine max
  Clone ID: LIB3167-017-P1-K1-H11
gtttgtggtcccattatgtgtaatcgttgcttggataatgggtatcgatatggacctgaacttcaacctcctagagacaggttcccttgcgttggcaataatagtcacaggcttcactttacaggatgggacttctcactacatgaaaggccttgttctcctgctgtgctacattgttattggggcatgcttcttcgtacaaagaacaccctttaataatcaagctgatgttactaacatcacacttaaaccaaccactaatgcagttttaagcgcttaattagttcgctttggcctatttgttgtcccttcctaagatgaataatggtggcttcgatccaaaccaaaaatcatattcaaaattcatgcattgattat

SEQ ID NO: 49909 - DNA, 419 bp, Glycine max
  Clone ID: LIB3167-017-P1-K1-H12
gctagacctacgcgtacgcccacgcgtagcagtctgaaccaaataccatagtcttctctttgtctgagaaaatagttccccccaaaaataaaatgaacaagggtctctcctttgtgctgctgattcttctgatccactacaacaacgttgtcaacgccaacaacaaaaactgtgtcacagaggattgcctcatcggcaacaatgatttggaatcagaattctacttcggttcccatgtggccagaatgctctacgatgtgagccaatctgtgtctggcccaacagggcatttaaacaacaaaacttgttattgtccacaaaacaaatggctaccgaacctgcttgcctttcaaaaacggtggtgggcctaaccaaagttgtggcgattacaccaaggtttgctaaagaacatgttccaa

SEQ ID NO: 49910 - DNA, 279 bp, Glycine max
  Clone ID: LIB3167-017-P1-K1-H2
aatttaggttctcttaaaacaaaggcccctcaatccactttccccacactcttttagtgtgtcgtattttttcctctctttctccacaattaggtcttggaccgacccttttgtgtaagtgcaatggccatggctaagcttgtatgtgttctgcttctggcattccttgcgatttccatgatcacaactcaagttatggcaacagattctgtctatcacttgcatggaaggagttatggacctgggagtttaaagaccccacagcgcccttttgaatgc

SEQ ID NO: 49911 - DNA, 326 bp, Glycine max
  Clone ID: LIB3167-017-P1-K1-H3
aaaaagaaacagataaagaaagaagagcagcagttgctcgacgaagagggtgctgctattgctgaggcagttgctctgcatgttctactcggcgaagactcggacgagtcatgtaaggttgtgatagataatggtaaccaaaatattggcatctccgtaagtggagaaagtgcttgcttccctcatctagagggcggcggcggttggtcttttgaaagagtgggttgggtctctgatgcatacagatatgggtgcgacaggggtgctgctgaaaatggggaatggtcatttctaactgagccctttgagaagaacatgcatgaacc

SEQ ID NO: 49912 - DNA, 245 bp, Glycine max
  Clone ID: LIB3167-017-P1-K1-H4
acgcgctaacactcattaattgcaagaatggcacttttttgcttggagatgtccctttctgttctcttcactcttggtcttgcgagagaaagccatgccatatacgaagatttttggcatgctgtttggccaaacactcccattccaagctcattgtgagatcttctaaagtctgcccctgcacgtgatgaaatagatgatcaccctatgcaaattgaagaaacacagtccccgagaaccttttt

SEQ ID NO: 49913 - DNA, 324 bp, Glycine max
  Clone ID: LIB3167-017-P1-K1-H5
gaaagatacctcgcaaagcagcagggtgaagtggctgtagattctgtatagagcgttggtcaggaatatacctataggtaatgacattgcagccaaggaaaatattatcttaagagaaacaatgattaaaatcacagcgtcttttcttagaaaattttcaggtgaatgacaagtgtattttggagaaaactatgcgtgtgtgtggtgatctgatcattctctatgtagataaatgtcattttgtctttaggcttttttgtcgtgggaataattttgacggattgatgtgaaatatcttattcaagttcttatgatcaatgtttt

SEQ ID NO: 49914 - DNA, 398 bp, Glycine max
  Clone ID: LIB3167-017-P1-K1-H6
acgcgtaccgcgagagtctggacgaaattccgtgcgagttgaaaaccctagtgagttccaatgatctccactcccttaacctcatgcaacacaccatattgggaaggttgcaggatagcaatgcggtgttgtcgcatttcaacgacttctctcagcactgctttgctgagatttccggcgacatcgctagaaacacgcgtgttttgaggtctgtcaagtccgaccttgattatatctttcagaagctcagaagtatgaaataaaaaattatggctacttatcccgatgcattttctgaagactcatcgagcgaagtgattgataggagaccggatcttgaaatgtccaagtaactaacgttatccgaacacagattagaatgagttatactaatgaaa

SEQ ID NO: 49915 - DNA, 235 bp, Glycine max
  unsure at all n locations
  Clone ID: LIB3167-017-P1-K1-H7
acccacgcgnacgggccaagcngattanaaangagaaagctttcatctttgcaaagcgcacccccgcgctgcgggggtcccttgttgcttgggagcacccactcatatgctacttctactgcttcacgaacaactcaagattcatggaatgaatatttgcccaacacaaatctaaatgggcatgaacataaagcccacatccgatttcctcatcactaaccaacactcaacaaac

SEQ ID NO: 49916 - DNA, 411 bp, Glycine max
  Clone ID: LIB3167-019-P1-K1-A1
cccacgcgtccgataaaagaattgccattttcatttcaaaatcttattggactccgtgagataaccctgaggaggtgtagaattgttcggttacgatgtagcttagccatgatgcccaatctgtttcgattccaaattagaaattgcaacagctggcaatgggtagaatcggaagcaggtgaagaaaaagtggaggttagatatccaaatgtgttagagtatgaaaaagaaaagaaagaagaaggtgtgttagagttagagagctcactcatcaaaggaagtggaatccatatattcagagaagaaggcagtatggaggaagatattcgatttgatgatccatatctcagcagctctgcatcagaaagcccctccttgctacaaaccatagctttggggacacgcaagttt

SEQ ID NO: 49917 - DNA, 408 bp, Glycine max
  Clone ID: LIB3167-019-P1-K1-A10
gctgactctagcagatctttcaagaatggcacaaattaacaacatggcacaagggatacaaacccttaatcccaattccaatttccataaaccccaagttcctaaatcttcaagttttcttgtttttggatctaaaaaactgaaaaattcagcaaattctatgttggttttgaaaaaagattcaatttttatgcaaaagttttgttcctttaggatttcagcatcagtggctacagcctgcatgcttcacggtgcaagcagccggcccgcaaccgcccgcaaatcctctggcctttccggaaccgtccgcattcccggcgacaagtcgatctcccaccggtccttcatgttcggcggtctcgcgagcggtgaaacgcgcatcaccggccttctggaaggcgaggacgt

SEQ ID NO: 49918 - DNA, 351 bp, Glycine max
  Clone ID: LIB3167-019-P1-K1-A3
ttctttctttttctgtgagcctttctttcaggttcttaacttgatcagtgtgcagtgtccaaatcataagggtagttgcaaattgcaatggctaagcatgatgttgagggtggttccttctctgcaaaggactaccatgatcctcctccagcaccgttgattgatgctgaggaactcacacagtggtccttctacagggctttgattgctgagttcattgccacaatgctcttcctttacatcacagtgctcactgtgattggtttccaaaacccagagtgatgtaaaggctgggggtgatgtgtgtggtggagttggcattcttggctttgcttgggcctttggtggcat

SEQ ID NO: 49919 - DNA, 413 bp, Glycine max
  Clone ID: LIB3167-019-P1-K1-A4
ctataagctagtttatcgtgaggagaatatgaagttgtttgttttctttgttgctgcagtagttttggtagcatggccatgccatggcgcaggctaccaaaggttccctctccgaatgaaaactggctatggtgagcgttcttcggaggtaaaatgcgcaagttttaggcttgctgtggaagcacacaacatccgagcctttaaaaccattcctgaagagtgcgttgaaccaacaaaggactacattaatggcgaacaatttagatcagactctaaaacagttaaccaacaagctttcttttatgctagtgaacgcgaagtccatcacaacgacatatttatattcggcatagataacaccgtactctctaatatcccatactatgaaaaacatggatatggggtggaggaat

SEQ ID NO: 49920 - DNA, 393 bp, Glycine max
  Clone ID: LIB3167-019-P1-K1-A5
gaagcattatcacaagcaagaagaacttgtcttagcagaaaaggcctctccagagatggcatctagagccctcaaacctgcccctttcactgttgagaagtcctcagttagagggcttacctccctctcaaggaactacctttcattcacagatgtggccaagcgtggcaagaagatcaagactgacacgccttaaggaatcaatgacggcatggctttgacggaaggagatgacgcatgtcgcacgaaaggaaagggaaagggcgcctaccagtttgtagacatatactgtgctaatgtcaatggttacagccctatgtacgacacccaagactggtcttcaaccgctgatgtacacgctggcgagccgactggcttggctatcgtggctga

SEQ ID NO: 49921 - DNA, 400 bp, Glycine max
  Clone ID: LIB3167-019-P1-K1-A7
tttgttttgtgctttagataaaagttctgccaaatcaagaggggttttaagatcatagtgtgtgttttgcaacaatggctaagttctttgctgctatgatcttggcactctttgccatttccatacttcaaacagtggtaatggctgctaatgaacaaggaggccacttgtatgacaacaagagcaaatatggaagtggaagtgtcaagagttaccaatgcccatcacaatgctcgaggagatgtagccagacccaataccacaagccctgcatgtttttctgtcagaagtgctgcaggaaatgcctgtgtgtgcccccggggtattatggtaataaagctgtgtgcccttgctacaacaactggaagaccaaggaaggaggacccaagtgcccttgagc

SEQ ID NO: 49922 - DNA, 398 bp, Glycine max
  Clone ID: LIB3167-019-P1-K1-A8
cccacgcgtccgatcttcttcaaattcctgtcctgaagatgacagcaaagtggtatctcattgtgtgtgttgtagcgatctgggccgttgatctgggttcatcatcacaccatgcccgtgccccagcaccagcaccgtcagtggagtgttcaaacctggtattgaccttatcggattgcctcaccttcgttagcaacggcagcaccgtcaccaagccacagggaacatgctgctcttccttgaaaactgtgctcaacacagcccctaagtgcctctgcgaggctttcaacagcagcgctcagttaggtttagccatcaatgtcaccaaagctgtcacgcttcccgctgcttgcaaactctttactccttctgccgctaattgtggactgtctgcaacg

SEQ ID NO: 49923 - DNA, 407 bp, Glycine max
  Clone ID: LIB3167-019-P1-K1-B1
cccacgcgtccgcccacgcgtccgattatcttctcttctcttccgccaaggtaatcccttccctctccaataatcaaacaatctcacttttttcttttgatacattcaatctcaaaaattgttttaaaaatggcaatggcagcccaagccatggctcaattccgtttctctcctctatcttctcattaccgttaccattaccagtacaattaccattccaccccttctttcccgtccccgcgacgtcacccccgcaaccaaaggctccacctttccttctccggcggagacagaggcggaagcggcggcggcggaagaggaggagattccgatggaggaggaggcgacaacgagaagaacgtgggattgggagttgtgggaatggtgttaaacggatggagatcgag

SEQ ID NO: 49924 - DNA, 183 bp, Glycine max
  Clone ID: LIB3167-019-P1-K1-B2
aaacggcatcgacgcccaccgtttcggttagcttctcatgtcctccgggatcgtctggaatgacaacgttcattgggttactttccacagcggttacgatttcggttaacttgttgaagctcttgacgtgttaggatttgtccgatacacattgtgtgattttccaatttgatatacatgtat

SEQ ID NO: 49925 - DNA, 411 bp, Glycine max
  Clone ID: LIB3167-019-P1-K1-B3
gctgtttccacagaagtgacaaaaaaagataattagttacaacagtatacaatggcaccaggggttaagaggttgggtgaggacaaggctagtgttgtgtgtcacaaggagaattacccttatgcagtgttttattgccacaaatcagaaaccacaaaagcctattctgtcccattggagggtgctgatggaagcagggtcaaagcagttgcagtgtgccatactgacacatcaaagtggaatcccaagcatttggcgtttcaagtgcttaaggttcatccaggaactgttcctatctgccacttcctgcctcaggatcatgttgtctttgttcccaagtagaaatgtttgttccgtcccaaaataattattatagctcatgcttcataccttgattttataataacactt

SEQ ID NO: 49926 - DNA, 364 bp, Glycine max
  Clone ID: LIB3167-019-P1-K1-B7
ctcaaagataagcctcccactctactgattctaaacaagaaggaccttgttaaacctggtgaacttgcaaagaaacttgagtggtatgagaaatttactgaagttgatgaggttatacctgttagtgccaaatatggtcagggggttgaagatgtcaaggactggatactgtcaaagcttcccaatggaccagcttattatccaaaggatattgtcagtgagcatccagagagattttttgtagctgaaattgttagagaaaagatttttatgcagtatcgaaatgaaattccatatgcatgtcaggtaaatgttgtaaactataaagctcggccgaatgcaaaagaatacatacaagtagaga

SEQ ID NO: 49927 - DNA, 413 bp, Glycine max
  unsure at all n locations
  Clone ID: LIB3167-019-P1-K1-B8
ccacgcgtcgggaaacttctaagaaaaaaggaacacaaggagttattgagatntgaaaatcctaacttggtaaagccaaagagcttgaaagctagagatgttgatgttggaaaaacaacagaactttcaaggcgtgaaagagaggagatagagaaacagagagcccatgagcgctatatgaggctgcaagagcaaggaaaaacagaacaagcaaagaaggatttagaacgtttagctcttatacgtcagcaaagggaagatgctgctaaaaagcgagaagaagagaaagctgcgaaagagcagaagaaggctgaggcgcgcaagtgagtttcctggaaaatgtcatgccaccaaaaatttgctccaattagtaaggtggaacggttgctcctactacacttaaaacattatgt

SEQ ID NO: 49928 - DNA, 405 bp, Glycine max
  Clone ID: LIB3167-019-P1-K1-B9
cccacgcgtccgatttgactctcacaaaccttgcatccatccacacatggctggcatgaactctagcgtattggcctgtagctatgccatatctggtgcagcatgctccgagctcaatgggaaggtcacttccgtggcctctgttgcatcctctggctacaagttgccattgatcaaatgtgaggccagagttcccaaagccaaagaatctgaaggaaggagaggtgcccttgttctcttggcagctacccttttcatctctgcagcctccaattcttctgccaatgctgggatcattgatgattaccttgagaggagcaaggctaacaaggaattgaatgacaagaagaggttagctactactggagcaaactttgcaagagcatacaccgtggaattcggtag

SEQ ID NO: 49929 - DNA, 408 bp, Glycine max
  Clone ID: LIB3167-019-P1-K1-C1
caaatatatatatcagatgcaggagtacttgctgtatgctatggccttttctgtcttgccatggcaaaagggcttgcctgggtggtgtgtgtttatggagttccattgcttgtggtcaatggatttttggtgttgattacatttttgcagcacactcaccctgcattgccacactacacttcctctgagtgggactggttgagaggagctttagcaacagtggatagagattatggaatcctgaacaaggtcttccataatattacagacactcatgtagctcatcacttgttctccacaatgccacattatcatgcaatggaggcgacaaaggcaataaagcccatcttgggagagtattatcggtttgatgggactccatttgtcaaggcaatgtggagagaggca

SEQ ID NO: 49930 - DNA, 414 bp, Glycine max
  Clone ID: LIB3167-019-P1-K1-C2
ctcacgcgtgcggttgacacttccactcttacacccaaagttagccatagtctgccacaacctacacaaacacatggcgctggcaatcaatcttctggatttgttgtaaagatcttgcaattcctgttgccattgttgatactgggcctcgcatttgccctgcagtattatggccaaaagaagcatgctagcacctcatgaaagaggaagttgagctagagccgaagtttcagtaggtttcttaattcattgcctacttcaatgcatgatcaaagtggtaatagactttagtcaatgttgtgtctctgtgtcattaaaattcgttaccccaccccacaccatgcaggcccttgatgctttgtggtgtctttgctcagtcatgctagctgttcatttagacaaatgatttttgat

SEQ ID NO: 49931 - DNA, 124 bp, Glycine max
  Clone ID: LIB3167-019-P1-K1-C3
gcaaatgtgaaatttgaagatcgttgaatctctctatctttgttcctgccgacttatttgagagcaggctatctatgcatgtatgtaataaaataatatcaagttatccacgtcttttgtgctt

SEQ ID NO: 49932 - DNA, 409 bp, Glycine max
  Clone ID: LIB3167-019-P1-K1-C7
cgtcccttgaacaatgagcagaaggagctatgaaactgcggtgactgaagaagcaccacccaaacagtccctaccgaacctcttctctttgtttcctaaaatcaattttcaactccctttcctcccacccaaacctaaacccaaacctcaagaacccaaccctcaggctcagcaagagggtccgaagcctagccgtgtacagtttccgaaaacccaagtggcggtggttgcttcttcgcctctgcaagctgaacctgatgctgaccactctcccgctgctaagacaaccaatcctcttatactctggcagatttatgcaataggagcgattgcgatttcatcatgggtttgggcaagatggaatgagaggaagggccgaggtggggggtctcccaatgatgagaggggt

SEQ ID NO: 49933 - DNA, 407 bp, Glycine max
  Clone ID: LIB3167-019-P1-K1-C8
gaagactcctcaatcatccatagacatggccaccgtcacttctgcagcagtttctattccctcattcactggcctcaaggcaagcgcaggcaaagtgagtgccgccgcagttaaagtctcagctccccaagccacaaggttctgcggcatcaaggcttccctcaaagacgttggagtcgctgttgtggccactgctgcgagcgcagttctagctagcaacgccatggccattgaagtgttactgggcactgatgacgggtctctggttttctctcccaactctttctccgtggcccctggggaaaagatcgtgttcaagaacaacgcaggtttcccccacaacgttgtgttcgacgaggacgagattcctagcggcgtggatgcagggaaaatctccatgagcgaag

SEQ ID NO: 49934 - DNA, 406 bp, Glycine max
  Clone ID: LIB3167-019-P1-K1-C9
gtcgccgaaccggcttgtcgtggatgatgctgtcaacgacgacaactccgtggtcaccatgcatccccaaaccatggaaaagcttcagcttttccgaggggacactatcctcatcaagggtaagaaacggaaggataccatttgcatagctcttgctgatgagaactgtgaggagccgaagatcaggatgaataaagttgtgaggtcaaatttgcgggttcggcttggagatgttgtgtctgtgcaccagtgcccggatgttaaatatgggaaacgtgtgcacattctgcctattgatgataccattgaaggtgtcactggcaatctgtttgatgctttcttgaaaccctatttcttggaagcttaccgtcctgtcagaaaaggagatctatttcttgtccgggga

SEQ ID NO: 49935 - DNA, 403 bp, Glycine max
  Clone ID: LIB3167-019-P1-K1-D2
cccacgcgtccgcttgcagttccccacatcatgaacagcaacaatctccaaggaagaagaatgagaacaagttagcaaagttggcaatagttgcacttgctgctggtgtgttaacacttgggtcagttcatgatgcatcagccgccaagactggtggtagaatcgggggccaggccttcaagtcagcagctccgcgctcctcaccaagaatcaacaattccagaaccaatatctatattaatcctcgagtggcacctccgctagttggtggctatggctatggttatggtgtgccattttacggtggctgcggatggtctccattttcattctttgcaccaggtcccagtgtagctgtaggcgttggaggtggatttgacactattcttctgtttatgtttct

SEQ ID NO: 49936 - DNA, 411 bp, Glycine max
  Clone ID: LIB3167-019-P1-K1-D3
tcgtccacgcgtccggctgaagtgtctgcttcttcctattccggcacgcccccatcaccatggtgaacgttccgaaaacaaagaagacatactgcaagagtaaggagtgcaggaagcacaccctgcacaaggttacccaatacaagaagggtaaagatagcattgctgcccaaggaaaacgccgttacgatcgcaaacaatctggtctatggcggacaaactaagcccgtcttccacaagaaggctaagaccaccaagaagattgttctgaggttgcaatgccagggttgcaagcatgtctcccaacacgctattaagaggtgcaagcactttgagattggtggtgacaagaagggcaagggaacatctctgttctagtttgcgaattaggattcgcagctttttatgttt

SEQ ID NO: 49937 - DNA, 392 bp, Glycine max
  unsure at all n locations
  Clone ID: LIB3167-019-P1-K1-D7
tcgagttttgatacaataactaagttccaatgtttatgaacatgtaaagcatcaaagttgcaagtgaagaaattagatgctttacatgttcataaacattggaacttagttattgtatttttgctactactcgttggtcgtcccgttgttttgggactaggtttgtgctggctagcttgctttatttatttcgatttttttttttttattgattttaagggggnaagaaataaaaaaaaaaaggacgagtaaggggtgaaataacacccaccctccatttctagtcccctttggggggggtgttttttttttttttttgccgcgcccgccccccccaaaaaaaaaaaccnaaaaaaaaaaaaaaaaaaanaatgtgttattttttatttttt

SEQ ID NO: 49938 - DNA, 392 bp, Glycine max
  unsure at all n locations
  Clone ID: LIB3167-019-P1-K1-D8
cggagaggatgagaagagagtgaagtttgtgaaagagatggcactcgtaacaacaaacccaaccatcaatgaggggcctctgttcgccgaagttgacatgggttccgacttcaacgccccaacggttcgagctaccgttgttcaagcctccaccatcttctacgacacaccagccaccttagataaggctgagaggttgttggctgaagctactagctatgggtcccagcttgtggtgtttccagaagcctttgtgggtggctacccgcgtggttcagcttttggtctttcgatcggaaattgcactgttaagggtagagaggagtttcgcaagtatcattctgcagccattgatgtgccnggggctgaagttgatagattggtagcaatgg

SEQ ID NO: 49939 - DNA, 416 bp, Glycine max
  unsure at all n locations
  Clone ID: LIB3167-019-P1-K1-D9
cccacgcgtccgnnaaaaaaaaaaaaattaaaaaaaaaaaaaaaaaaaaaaaaaaaagggaaaaaaaaaaaaaaaaaaaaaaaaaaaaaaaaaaaaaaaaaaaaaaaaaaaaaaaaaaaaaaaaaaaaaaaaaaaaaaaaaaaaaaaaaaaaaaaaaaaaaaaaaaaaaaaaaaaaaaaaaaaaaaaaaaaaaaaaaaaaagagggggggggcttaaaagaaataaaaaaaactcccagggggggaaaacactaatatttttttttaggaaggcaaaaaaaaaaaaacagcgctcggtgtataaaacggattactgggaaaaaacgggggtgaagcaaatttaaaagtcttagaaaaaaaatccttttttggagaggggcttaaatataaaaaattggcaaaaaaataattttttt

SEQ ID NO: 49940 - DNA, 412 bp, Glycine max
  Clone ID: LIB3167-019-P1-K1-E1
cccacgcgttcgtccacgcgtccggaaaatggttgtgcctctgctctcaaagaagatcgtgaagaagagggtaaagaagttcaagaggcctcagagtgacaggaaaatttccgtcaagactaactggcgcagaccaaagggtatcgattctcgtgttaggagaaagttcaagggatgcactttgatgccaaacattggttatggttcagacaagaagacccgccactatctccctaatggtttcaagaaatttgttgttcacaatgtgaaggatttggaactgctcatgatgcacaacaggacttactgtgctgagattgcccacaatatatccacaagaaagagaaaagatatagtcgagagagccgcgcagcttgatgttgttgtgacaaacaaaacggccagattacgc

SEQ ID NO: 49941 - DNA, 413 bp, Glycine max
  Clone ID: LIB3167-019-P1-K1-E2
cccacgcgtccgattaaattatggtgtccctagtgaggatttgaaatgggttgttagaagcaaagagaacaagagtgaggaggaagttgaacaagtctttgacgcagtggttgtggccactggccatttctctaatcctagattgccctgcattcaaggaatggacacatggaaaagaaaacaaatgcacagtcatatttacaggtcttcagagccattccgcggggagatagtggtggtggttggaaattttttaagtggacaagaaatatcaatggaacttgtgaaagtagcgaaggaagttcacctcagttcgaaatctcttatcatttttgagggtttatccaaagtcatatccaaaaacgagaattttcaccttcgtccacagatagacacccttcaagaggatggga

SEQ ID NO: 49942 - DNA, 409 bp, Glycine max
  unsure at all n locations
  Clone ID: LIB3167-019-P1-K1-E3
naaaaaaaaaaaaaaaaaaaaaaaaaaataaatttataaaaaaaaaaaaaaaaaaaaaaaagaagggaaaaaaaaaaaaaaaaaaaaaaaaaaaaaaaaaaaaaaaaaaaaaaaaaaaaaaaaaaaaaaaaaaaaaaaaaaaaaaaaaaaaaaaaaaaaggggggggcggttttaagggaccaaagtttacgaccgggggcgggggaaaaaaaattttttttttgggggccccaaaataaaataaacgggccggggtttaaaaacggggggaggggaaaaacccgggggtccccaaaataaaaggcctgggggaaaatccccttttcgcaggggggggaaataaaaaaagggcccgaccggatgccccttccaaaaaatgggccaccctaaatgggaattggacccccc

SEQ ID NO: 49943 - DNA, 407 bp, Glycine max
  Clone ID: LIB3167-019-P1-K1-E8
cccacgcgtccgtgagaatgatgcatattttttttcgtatcgggggggtagcgactgatctaccttatggttgggtagataaatgttatgatttctgcgattattttttaacaagaattgttgaatatcaaaaacttattacgcgaaatccgatttttttagaacgggttgagggggtaggtgtagttgatataaaggaagtaataaattggggtttatcaggacccatgcttcgggcttccggaatacaatgggatctccgtaaagtggataattatgaatgttacgaagaatttgattgggaagttcaatggcaaaaagaaggagattccttagctcgttatttagttcgaattggtgaaatgatggaatccataaaaattattcaacaggctttggaaggaatt

SEQ ID NO: 49944 - DNA, 402 bp, Glycine max
  Clone ID: LIB3167-019-P1-K1-E9
ttccaattttggcaccacaccatgccatctcctcaaccatgtcctcacattcacattgttccttctcctctcttgccattgccacctcctcaatggccaagaggacacctcatttggccgtgccatagacagaaaattgttaggcctaaagagaaaagaaaagctcagccacttcaaattttattggcatgacatagtgagtggccgcaaccccacttcggtggcggttgtttcgtcaccgccgcaggtgaacacgaccacagcatttggcttggtgaacatgattgacaaccctttgacgttggggccggaattgagctccaagcttgtgggtaaatctcagggattttacgcgtcgggctcgcagactgagattgatcttcttatggctatgaactttgc

SEQ ID NO: 49945 - DNA, 394 bp, Glycine max
  Clone ID: LIB3167-019-P1-K1-F1
gcaactttttgcagttttacaaagtgcacgaggatcttcagcatctgttttaaaggaaaaactttctgccttgggttcgtctggagtgttggcggaccatcagcttcaagctcaactacaagagcatcatcttaaaggccatgggcatcttacaatatcagacattgcaaggaaagcttttctttatagtcattttatggaaggccatgcaaaaatttctcctatatcacgcttgcctctcatcactgttctagataacaagcatcatctgaaggactttccagtttgccagccatttcatttggagccaaattttcagccgtgactgcgcctggatgcatcgtctgtggaatgggaagcatcaagagatcagatgcactagcaggagcaggac

SEQ ID NO: 49946 - DNA, 411 bp, Glycine max
  Clone ID: LIB3167-019-P1-K1-F2
cgcgtcgctccgcaccagtttcaccgcacgaatatcttgttgtttggagcgatccgagaaaaactctgtaaacatgttggtttaccaggacctccttacaggtgatgagcttctctctgactccttccgttacaaggaaattgagaatggaatgctgtgggaagttgaggggaagtgggttgttaaaggagcagttgatgtagacattggtgcaaacccttctgctgagggtggaggagaagatgagggagttgatgatgcagctgttaaggttgttgacattgttgacacattcagacttcaggagcaacccgcattcgataagaagcagtttgttaccttcatgaagaggtttatcaagaatttgactcccaagctcgatgcagagcaacaggagttgtttaagaagca

SEQ ID NO: 49947 - DNA, 452 bp, Glycine max
  unsure at all n locations
  Clone ID: LIB3167-019-P1-K1-F3
gtcgacccccacgcgtncgaattgcaaggaataggcacttcgttagcttggtgatgtnccctttctgttctctttcacttcttggtggttgcgatgagaaagccatgtccagagaccgaagattttttggcatggctgtttggtccaaacacttcccattccaaggttcattgcgagatcttctaaagncctgtgccctgcaagtgntttgtaaatcgatgatcaccctatgtcaaattgaagaaacacagtatcccgaaaacccttcttctataaagaagaccttcatccaggcaaaacaatgaaagtacaattcagcaagcctccctttcaacaaccatggggtgttggtacatggttaaaggaaattaaagacactactaaagaaggatatagttttgaagagctatgcatcaagaaagaagccattgagggagaagagaagttttgtg

SEQ ID NO: 49948 - DNA, 408 bp, Glycine max
  Clone ID: LIB3167-019-P1-K1-F7
cccacgcgtccggcttcggctctccatgcagctgttaattttgggcaatacccttatggaggttatatcgtgaaccgtccaactctagccagaaggtttatcccagaagaaggaaccaaagaatatgatgagatggtgaaggatcctcaaaaggcatatctgagaacaatcacacccaagttcgagacccttattgacatttcagtgatagagatattgtcaaggcatgcttctgatgaggtctaccttggccaaagggataatccaaattggactacggattcaaaggcattggaagctttcaaaaagtttggaaacaaactggcagaaattgagggaaaaatcacacagaggaacaatgatccaagtctgaaaagccgacatgggccagttcagcttccatacaca

SEQ ID NO: 49949 - DNA, 409 bp, Glycine max
  Clone ID: LIB3167-019-P1-K1-F8
gtttgttgtgagctataagctagtttatcgtgaggagaatatgaagttgtttgttttctttgttgctgcagtagttttggtagcatggccatgccatggcgcaggctaccaaaggttccctctccgaatgaaaactggctatggtgagcgttcttcggaggtaaaatgcgcaagttttaggcttgctgtggaagcacacaacatccgagcctttaaaaccattcctgaagagtgcgttgaaccaacaaaggactacattaatggcgaacaatttagatcagactctaaaacagttaaccaacaagctttcttttatgctagtgaacgcgaagtccatcacaacgacatatttatattcggcatagataacaccgtactctctaatatcccatactatgaaaaacatggt

SEQ ID NO: 49950 - DNA, 114 bp, Glycine max
  Clone ID: LIB3167-019-P1-K1-F9
gcgacatcaacacacatggcaagagcgtcttctgcaatctctagtggtggctcaatggctggccctatgaccagctcatgatgcgcatgctcaccagctaatgcgtcagctaca

SEQ ID NO: 49951 - DNA, 283 bp, Glycine max
  Clone ID: LIB3167-019-P1-K1-G1
tccacgcgttcgcacgacaacaacactcatcagtgttaaaagtcgcgcccactgccaccgctgccaaagtttatcgatgatcaagatctggctttctttgccaattttcttggcgttttcatcattgtactagtgttcgcgtatttatttttttattctgtcctatttttttttttgtttcatttttttttttattttttatttttctttctttaatttttctttttttttttttgtgttttttattatttttcttttctcttattgtttcttttttttttat

SEQ ID NO: 49952 - DNA, 412 bp, Glycine max
  Clone ID: LIB3167-019-P1-K1-G3
cccacgcgtccggaaaaacttgtcaccatggtttcttccgacaaggatccacgagaggatgggcttcaagcctggtacatggatgatagtgatgaagatcaaagactcccccaccacaaagaacccaaggagtttgtctcgttggaccaacttgctgaacttggagtccttagctggaaactagatgctgataaccatgaaaatgatccagagctgaagaagattcgtgaagagcgtggttacacctacatggatgtttgtgaggtctgcccagaaaagttgccaaattatgaacagaaaatcaaaagcttctttgaagagcatcttcacactgatgaggagatccgcttttgtgctgctggaagtggctattttgatgttagggatcgcaatgaaacttggattcgtgtgt

SEQ ID NO: 49953 - DNA, 401 bp, Glycine max
  Clone ID: LIB3167-019-P1-K1-G8
aagctagtttatcgtgaggagaatatgaagttgtttgttttctttgttgctgcagtagttttggtagcatggccatgccatggcgcaggctaccaaaggttccctctccgaatgaaaactggctatggtgagcgttcttcggaggtaaaatgcgcaagttttaggcttgctgtggaagcacacaacatccgagcctttaaaaccattcctgaagagtgcgttgaaccaacaaaggactacattaatggcgaacaatttagatcagactctaaaacagttaaccaacaagctttcttttatgctagtgaacgcgaagtccatcacaacgacatatttatattcggcatagataacaccgtactctttaatatcccatactatgaaaaacatggatttggggt

SEQ ID NO: 49954 - DNA, 407 bp, Glycine max
  Clone ID: LIB3167-019-P1-K1-G9
cccacgcgtccgcaatttttctctcaaccggcccaatttagcataagcccagcatggccaccgcaacagcagcagccacctcgtccttcatggggacgcgcctcctggaggcccattccggggcggggcgggtgcaggcccggttcgggtttggcaagaagaaagccgccgccccgaagaaagtttccagggggtcgggctctagctccgataggcccctgtggtatccgggcgccaaggcgcccgagtacctggatgggagccttgtcggagactacgggttcgacccatttgggctagggaagcccgccgagtacctgcagttcgagttggactcgctggaccagaaccttgcgaagaacgtggctggggacatcattgggaccaggaccgagctcgcggacgtg

SEQ ID NO: 49955 - DNA, 414 bp, Glycine max
  Clone ID: LIB3167-019-P1-K1-H1
tcgcccacgcgtccgaggcaaaagtcagtaacttctatgtctcagtatataaacaaaaaggaactaagagtttgtgttggaacatggaatgttggaggaaagcttccacctgatgacctagatattgatgattggttaggcattaacgagctagctgatatctatgttcttaggtgatgccttggctgtattgaagaatagtatgagtgaccctaacaatgttcttcaaagttggaattgtacccttgtcactccttgcacatggtttcatgttaattgcaacagtgaaaatagcgtgacccgtgttgatcttggaaatgcaaacctttcgggtcatcttgttccacagcttggtcagctcctaattttggaatgcttatgaataggtggatgactatgaagaacctcatgcta

SEQ ID NO: 49956 - DNA, 412 bp, Glycine max
  Clone ID: LIB3167-019-P1-K1-H2
gtgagctataagctagtttatcgtgaggagaatatgaagttgtttgttttctttgttgctgcagtagttttggtagcatggccatgccatggcgcatgctaccaaaggttccctctccgaatgaaaactggctatggtgagcgttcttcggaggtaaaatgcgcaagttttaggcttgctgtggaagcacacaacatccgagcctttaaaaccattcctgaagagtgcgttgaaccaacaaaggactacattaatggcgaacaatttagatcagactctaaaacagttaaccaacaagctttcttttatgctagtgaacgcgaagtccatcacaacgacatatttatattcggcatagataacaccgtactctctaatatcccatactatgaaaaacatggatatggggtgg

SEQ ID NO: 49957 - DNA, 407 bp, Glycine max
  Clone ID: LIB3167-019-P1-K1-H3
ctttatttgcaaggaagaatatggtgttcccttgagcaatggctgggctgcaacacatgaatttggccacaagttttgcatctcaaatgaaggtgatgatgacgatgatgataatggcgtcatcgatgtggccccagctgcatagaagaatttggcagaaaaacatgcatagatgaggaggagggatatagtagctagcttagtagtcactgtaagcttcattctgtcgtcttgcttagttacatttgtgtttactcttggaatatataggttatagtgttatgcgcgagtgacataatagaatttatattagtaattatggcttagttcctctctgtcggacccaataattttcttgtcgatcgtctttgacaatctattatctgatcatagtttttgtatatata

SEQ ID NO: 49958 - DNA, 392 bp, Glycine max
  Clone ID: LIB3167-019-P1-K1-H7
agaaaatggcggtgcctctactctcgattaagatcgtgaagaagagggtgaagaagttcaagaggcctcagagtgacaggaaaatttctgtcaagacaaactggcgcagaccaaagggtatcgattcccgtgttaggagaaagttcaagggatgcactttgatgccaaacattggttatggttcagacaagaagacccgccactatctccctaatggttttaagaaatttgttgttcacaatgtgaaggacttggaactgctcatgatgcacaacaggacttactgtgctgagattgcccacaatatatccacaagaaagaggaaagatatagttgagagagccgcgcagcttgatgttgttgtgacaaacaaaacagccagattacgcagc

SEQ ID NO: 49959 - DNA, 415 bp, Glycine max
  Clone ID: LIB3167-019-P1-K1-H8
aaaaaaaaaaaaaaaaaaaaaaatttaatttaaaaaaaaaaaaaaaaaaaaaaaaaaaagggaaaaaaaaaaaaaaaaaaaaaaaaaaaaaaaaaaaaaaaaaaaaaaaaaaaaaaaaaaaaaaaaaaagggggggccgttttaaaggaccaaaatttacgaacccgggcttgcaacataaaagtttttttattgggcaaccaaaattaaattaacgggccgtggtttaaaaacttctgaacgggaaaaacccgggggttaccaaattaaatggcctggaaaaaaatccccttttccccaagtgggttaaaagcaaaaaggcccagacaaatcgcccttccaaaaatttgccaaccttaaatggaaaatgggacccccccttaaacggcccattaaaagcgggggggttgggggt

SEQ ID NO: 49960 - DNA, 402 bp, Glycine max
  Clone ID: LIB3167-019-P1-K1-H9
cttttaataaaaaaaacttagaatcgcttcgaaaaatcgccatgaatcccacaatcctgttcgtgtttgctctgcttctgaatctcgtatccaattcgttccaaaaccctaaccctaaaacccccaaatcaacgtcatcgcaggctcacgtggagctcatcaaccacggcttacccgtcggtcttctccccgccaccaccgtcttgggctacgccgtgaaccgtacctgcggtgactttaccgtcaagctcggcggcgcgtgcaagatcacgctcccgccggacaactacgtcgccacctattccgacaccatcacagggaagatcgtgaaggggaaaatcgctgaactcgaggggattagggttcgcgcgttcttcaagtggtggtccatcaccggaatcc

SEQ ID NO: 49961 - DNA, 380 bp, Glycine max
  Clone ID: LIB3167-027-P1-K1-A1
cccacgcgtccgcccacgcgtccgataacattagtgtgaatgagaacaagggtgtgtgggaagcacacgaggtttgtgtacgatagtgaggatgagattgtggagaaagtgatagaatgttgtgctgagtctgatgtgatgcgtttgaagggtttgccaacacccaaaggaaagcaccttcgctttcctcaggaggaagaaaattcctctgacttgtgatttttgataattggtgctgctgcggtttggtttggtattgtctttcttgacaccactgttttggttaatggtgtgattggggaagctaaattgctgctccaaacacaaccattgttatttttctttatcaataataaataaaccattgcttgtttaaacat

SEQ ID NO: 49962 - DNA, 378 bp, Glycine max
  Clone ID: LIB3167-027-P1-K1-A10
ggcagaaagcaagctcatcctagagttttaaaaatggcagcagcctccggcagggctctctcttccccatccttggctggcaaggccgtgaagctgggcccatcagcccccgaagtcgggagggtcagcatgaggaagaccgtcaccaagcaggcctcctccggaagcccatggtacggcccagaccgcgtcaagtacttgggcccattctctggcgagcccccgtcctacctcactggcgagttcccaggtgactacggctgggacactgctgggctttcggccgacccagaaaccttcgccagaaaccgtgagctcgaagtgatccactccaggtgggccatgctcggggccttgggctgcgtcttccccgaacta

SEQ ID NO: 49963 - DNA, 394 bp, Glycine max
  Clone ID: LIB3167-027-P1-K1-A11
cggcccaacccttccatgccaaacacggctctaatagctttactctcctccacaacttcacaacgcacgtcccttccttccctcccttcttcctcctctccactttctcgcaaatttcccctcactttccgggaaaaaaacagaactccaatcacacctcacaagctccctttttcagcaaggcctaccaccaccagagtggtgttggtgaagtctcaggccacagcacctgcttcttctgaggctgtggcagtgacacctgtgtcttctgagatgaaggcatgggtctatggggaatatgggggtgtggatgttctgaagctggactccaatgttactgtgcctgatgtgaaggaagatcaggttctaatcaaagtttgtgctgctgctctta

SEQ ID NO: 49964 - DNA, 376 bp, Glycine max
  Clone ID: LIB3167-027-P1-K1-A2
cccacgcgtccgcccacgcgtccgctctttcataaacgggtggtgcctctcttgcatggccccagccaaaacctctctcaggaaggccacattacgcccttccgtcttcgcaacccttaacactccttcttctccttcctcttcatcttccttcccctctctcattcaagacaggcctgtttttgctgcccctgcccccatcatcaccccaactgtgagagaggatatggcaaaggaatacgagaaagctattgaagaacttcagaaattgttgagggagaagagtgaactcaaagcgacagctgctgaaaaagtggagcagataacaccttctctagggacatcatcatctgatggcatcccatcatcagaagcc

SEQ ID NO: 49965 - DNA, 432 bp, Glycine max
  Clone ID: LIB3167-027-P1-K1-A3
taccgaccggaagggcgacccaggcgtccgagcagacgaacgaactttcataaacaagaactaggacatggaatctcacttcaaggagggggatatggctatccacgcatacatatgccagccatgaagagggtactgcgagcctagactctgatgcattatgtcctcaagccacgtgcctctacgttcattatgtcttacaaggcaatagagcagcatcaaaagtacccaatcagaagagtttcaggtgagcggcttccatgaaggcagaaaggttgtgacagtgcctcacagcacgctgcattcacacgcctcaatgatggctctctgatgtggccgaggccgccgcttcgccttctctcaagaacttcttgctcagcatcgccgccagtggtgttgttgatgctgccattatcggtgcggaggtcgggg

SEQ ID NO: 49966 - DNA, 266 bp, Glycine max
  Clone ID: LIB3167-027-P1-K1-A4
gataatctcataaaaaacagaaaatggatttaaaaagagagacccttttgaagggacgctgttttaagccacgttggtgcaggtttcttcaatggcatgatcccaaggggagttttaggtacccatttcaaggctagttcctttgttggtgttgatggtgggaggccaaggcgtgtagtgttggtgaaagctgaggctgtgagcataaacccagatataaggaagagtgaagagatagtggtagattctgtggtggtaactgaact

SEQ ID NO: 49967 - DNA, 363 bp, Glycine max
  Clone ID: LIB3167-027-P1-K1-A5
caaagttacaagtaaagtaaattaataagatcattaatggcttctcttgcaacgttaggtgctgttcaaccagctgcgctcaatggccttgctggaagttccctctctggaactaagctctctttcaagccctctcgccacactgtcaaatccaagaacttcaggagtggtgccgtggtagcaaagtatggtgacaagagtgtgtactttgatttggaggatctgggcaacactacggggcagtgggacttgtatggctcaaatgcaccttcaccctacaaccctctttagagcaagttcttcgagacatttgctgcttcattcacaaagaggggattgttactcaagtttctgattttggga

SEQ ID NO: 49968 - DNA, 456 bp, Glycine max
  unsure at all n locations
  Clone ID: LIB3167-027-P1-K1-A6
ggaatnncccgggtgcgacgccacgccgnntccggcactttcttggttttctcttctcacctctcatatnnccatcatcttccacaacccatgggagcggtgtctctgtagcaatcagataatcaaagttaccccaaacagaccaactcaagggtagggagaaactgnatcccacttgcnnattttttctaactcacgacatcttatgagggcaaggaactatcacngnngtggtgaaaatcatcnnngagccatcagnnngagcgaggttcnngtgaagcaaccctgggtttggaacccactttcatgatggacaaatgttttgaccgagggtccagagctgagctcgaagcacgttgggagggctcaggggctgtttggcttggcctctttggaggaccgtggaatggtgatgctcattaacttggctttcagtgagggtgagtatgctggcag

SEQ ID NO: 49969 - DNA, 354 bp, Glycine max
  Clone ID: LIB3167-027-P1-K1-A7
cggacgcgtgggcgacactactgattcaaaagggtcatagggtactggggggggtagggattcgaattttgattatcgaatcgcaaaattctgaatcaatcaatcagtaattagagccattaacgactgcaatggtctgcgagaactgtgagaagaaattatcgaaggtgatagtaccagacaaatggaaagaaggggccagcattactaccgagggtggtggccgcaagatcaactagaacaagcttttctttcagaaaaacagattgacctcttactgaaacactgagtgcaccattttcatactacattttcaccactattcttagatctttcacacctatgctttctcta

SEQ ID NO: 49970 - DNA, 376 bp, Glycine max
  Clone ID: LIB3167-027-P1-K1-A8
gagataactagaaacagtgtgatgaaaatgaaggtccttgttttcttcgttgctacaattttggtagcatggcaatgccatgcgtacgatatgttccctctccgaatgaacactggctatggtgcccgtactccggaggtgaaatgcgcaagttggaggcttgctgtggaagcacacaacatctttggctttgagaccattcttgaagagtgcgttgaagcaacaaaggaatacatccatggcgaacaatatagatcagactccaaaacagttaaccaacaagcttacttttatgccagagacctcgaagtccatcccaaggacacatttgtgttcagtatagatggcaccgtactctctaatattccatactaca

SEQ ID NO: 49971 - DNA, 376 bp, Glycine max
  Clone ID: LIB3167-027-P1-K1-A9
cccacgcgtccgcccacgcgttcggaaaaaaaagattctaaagaaatatggctggtattctttagaataatcaaaaagaatattaaattcaaataaattttagatagaaaaaagacttaaaaaggaggatttgaaatgcgagatctaaaaacatatctttccgtggcaccagtagtaagtactctatggttcggggctttggcgggtctcttgatagagatcaatcgtttttttccagatgcattgatattcccttttttttcattctagttattgacacggaaaggggtgaagaagattatagatccaattaagtattaaatatatgtaattaatatgtaattaatctcctcttctttatttcggcttttatttc

SEQ ID NO: 49972 - DNA, 113 bp, Glycine max
  Clone ID: LIB3167-027-P1-K1-B10
attcccaactgtcgatttctattacaaatgcactttaccatggactttatgtgcagatggctattttaagcttacccatgaacttgtttagtttaatccacaaaattactgtg

SEQ ID NO: 49973 - DNA, 380 bp, Glycine max
  Clone ID: LIB3167-027-P1-K1-B11
atagctcacacttcaaggttactcacaccatccaattcaaaatcatccaatcgacatacaagtttaccaaaatcacactctgaccaaaaacaaaaagggccaccacatcagacacacacatctcaccctccttcaaatcaaattaactactagtagtaccactttactttcccttcctctaagctttattattttttctttctctaagtatttttagtgacaccctttttgaatcagatccaaaagaagctactagttttgtttctttctttacggggttttgagccaattatataagttttccatgcacgatttgtgcctagttgagagcatgaggctgatgagtctggcttggttctcaattctactggtgattctgg

SEQ ID NO: 49974 - DNA, 378 bp, Glycine max
  Clone ID: LIB3167-027-P1-K1-B12
gcacggtttcgtgtaccgtgagcactacaggtcacctggatactatgatggacgctactggaccatgtggaagctgcctatgtttggctgcactgatgcttctcaggtgttgaaggagcttcaagaggctaagactgcataccccaatggcttcatccgtatcattggatttgacaacgttcgccaagtgcagtgcatcagcttcatcgcctacaagcccccaggcttctaagtcattgaaaaatttgcaaagcatctgtagccaccccactttgtttgttgtacttaaactacattcccatttgtttttgctttatgagatttcatcatcctgtatttttggtttctgttttcggacttcaatggaaattaatggat

SEQ ID NO: 49975 - DNA, 379 bp, Glycine max
  Clone ID: LIB3167-027-P1-K1-B2
gtgagttaggatagccccagaaatagaaactcgaagttactcacttactcaactaccaccaccaccaccatgttctgatattcccccaaccacacacagtcactcttaaaaaaataattaaactttatgcaaatgcaaagcatgtcaaccaccatggcttcgttttctcctccgacccatttctcagccgcaccttcttcctcgaaactccgtcttgtctacaagaacaacaatttcttctctctcaggtcgaagagtcttgctttctctcccttgaaggctgctgctgctgagaacggcgttgggaccgccgtggagccgccgccggagcaggccgtttcggtgccggagctgcctccgccggcggtgggaaattctg

SEQ ID NO: 49976 - DNA, 378 bp, Glycine max
  Clone ID: LIB3167-027-P1-K1-B3
agatggatcaggttctgcaatccagatctgagtaaaataataaccgagtggataggtactgaggattgggtcctaaatactggaaaattggccgagctacggaagtttgtagacaatgaggatctacaagtgcagtggagggaagcaaagaggagtaacaaagttaaagttgcagcattcatcagagaaaaaacagggtattctgtcagtcctgatgcaatgtttgacatccaggtgaagagaatccatgaatataagcgacaattaatgaacatatttggaattgtttaccgatacaagaagatgaaagaaatgagtgcggcagaaagggaagcaaattttgttcctagagtttgtatatttgggggaaaagcattt

SEQ ID NO: 49977 - DNA, 379 bp, Glycine max
  unsure at all n locations
  Clone ID: LIB3167-027-P1-K1-B4
ccaacccgtccgcccacccgtccgtttttttttcccttttccttcaaaacttggttggtgccaaaatcaccatcattttctctaggtttatactcccccagaactaatgttaccggtgtcaaagttcatgctaaattaggtggtggagatgaacaagccaagaaaggaggaaagaagaaattcataaccagagaggaagaaccacaccagtattggcagacagcangagaaagggaaggagagaatcccatgaagacccctcttccttacattatcatatttggtatgtcaactccctttgtaatcttggcaattgcttttgcaaatggttggattaaggtacctgttcgatgagacagcacttcgttgtctactctac

SEQ ID NO: 49978 - DNA, 372 bp, Glycine max
  Clone ID: LIB3167-027-P1-K1-B5
ccaatcaaaccaatcattcccctgttaccaaaaccacactgtaaccccccttttttgggtttgggcttcaaatgagttcggctactaaaaacgcggcaaacgcggttggggccaaaacggcaagagcatgtgacagctgcataaccaaacgtgcacgttggtactgtgctgccgatgatgcttttctctgccaggcctgcgactcttctgttcactcggcgaatcctttggctcgaagacacgaacgagtccgcttgaaaacggcgtcctacaagtccactgatgaacaacaacaacaacaacaacaacaaccttccacgtggcacactaagaaacctcgaacgccgaggcacgggaaacattctcgtaaca

SEQ ID NO: 49979 - DNA, 264 bp, Glycine max
  Clone ID: LIB3167-027-P1-K1-B6
ccgggcgacccacctcgtcactctacactcgggccttacacttcattctcggcgtccattcacatacactctcttccagctcgtcagtcattacaatactcactcggtatattgcttccactcactatctacagtagccaaatggagcccatcagagatatgctatttcatgggataaggcagcttatttggccaaggacattatcttctgctagtcttgaataagctgatgtgtattctatctcaagtatgatcaacagtgat

SEQ ID NO: 49980 - DNA, 368 bp, Glycine max
  Clone ID: LIB3167-027-P1-K1-B7
gttgatcttgaagataatgtttaattcatcaaagacatcattcataggaggggggaactacagtcacaagttgggaaattgaaaactcggattgataatgtggttagtgaaaatccaggaaagttctgttctgtaactcaattgagcatgattggatcatctgatggatttaatcattctcgccataattctgcttcttttgttggaaatgacaacacatttccggacaggataacttcctttatcgaaacgactattaagccccatcttgagtttctccaggaaaataccaaggatgaaattcttatacaaaatcaggcagccaatgaagagttgtatgattttgagagtgttagaaatcagtttgt

SEQ ID NO: 49981 - DNA, 377 bp, Glycine max
  Clone ID: LIB3167-027-P1-K1-B8
cacaaaaccagctaagtcaccagctgaagaagactggaaggttaagcgagaatatctgctggaaaaaagggtaagaagtgtggatgcaaaggaagctttccgtcttcagaaagaaaataattttgtgattctcgacgtaaggccagaagcagagttcaaagaggctcatcctccagatgctatcaatgtgcaaatatataggcttataaaagagtggacagcatgggacattgccagacgtgctgcatttgcattttttggtatttttgctgggactgaagagaatcccgagttcatccagtctgttgaagcaaaattagataaaaatgcaaagataatagtagcttgctcagcagggggtacaatgaaaccatcac

SEQ ID NO: 49982 - DNA, 380 bp, Glycine max
  Clone ID: LIB3167-027-P1-K1-C1
ctcttctctctccacccaaaccctaactcctgaccctgttcccctctcgtatccgtcgggaaaggaggaaagtccaagaccgaatctaagagagccgatcccaaacttgctgtgaataagaagggagccgccaccaaggctaggaaacccgccggcaaggggaaggcagcgaaagaccctaacaagccaaagaggcctccaagtgctttcttcgttttcatggaggagttcaggaaggtattcaacaaagaacatcctgaaaacaaagcagtgtctgctgtgggcaaagctgctggagcaaaatggaagaccatgtctgatgctgaaaaagcaccttatgtggcaaagtctgagaaaaggaaagtggagtacgagaagaa

SEQ ID NO: 49983 - DNA, 368 bp, Glycine max
  Clone ID: LIB3167-027-P1-K1-C10
gtggaatgatatcataacttctgtttccatttttttttcttttctatggccgaatttaccgattttgtcaaatttctgcaggtcatacagagtagagagcaaggttatccaattatagtgtcttcaattccaagagaaactaacgctttatactctttgcgtgacccatctgaagtactaatctttttgtcacggttggcaaaatggaggaaaacctcttactaaagcatgcctttaaattttggttaaggcatgtggatcatcaccagagggagaatttggcagggcatataatagttacttcccatgatggatttggagaattgggatggatcctattttcttttttagtaccttgttggaaaaat

SEQ ID NO: 49984 - DNA, 372 bp, Glycine max
  Clone ID: LIB3167-027-P1-K1-C11
cccacgcgtccgctcatatccttattctgtttctttcaatggaagtcgggtcggcttctagcttgaatcccaacgctccgatgttcgtgccactcgcctatcggacggtggaggatttctccgaccagtggtgggacctcgttcactcctccctctggttccgcgactactggctccgcgagtgcttccaagatccccagttccaaaacgacgacgctttcgacttcgactttgacctagatctccaagatgaagatgaaagggaactaaaggaagggaaggaggtggtgtctttggggctgctgaaatggcgaagctgtggaggaggatgggcccatgcgccgaggaatgtggaaaaggcccccaagtttg

SEQ ID NO: 49985 - DNA, 370 bp, Glycine max
  Clone ID: LIB3167-027-P1-K1-C12
attcgaaacagggaaagcaacctgatctcgctcgttgtcaatggccttacgctgaatgtcgtatattgcgatcaggcctacactatgttcgttgtgcgaatgcacactgactgtaaggggctcgctaacgccttgaacaccgcaagttgcacccatcgttatcaccgcatacaacaatagcttgctttgaaaccacctctgagtagagcaccctatcaccagaggcatacatccaatgatcacaacatagcatcacactgttaatcaactcaccaacacgctctactcgctaccatcgaactctaagatactaacgctgactcatgagctttcattatagatcgcaaccgactctataatatgatatact

SEQ ID NO: 49986 - DNA, 370 bp, Glycine max
  Clone ID: LIB3167-027-P1-K1-C3
ctcacgagtgcactagttcgttctagaaggctctattatcatcagataaaaccgcccctatctctattttagggtttttattatcttcatttcatcgtttcgttacgttctgcttcgcgtggaccaacaagaagtgtaagttttcattcaatggccagcgctcagctctcagcaatatcttcgtcgatctctacggcgtcgtttgaagggcttcgaccttcggctgttcagtttgcttccgcgggcagaattagaattggcaatctctcccaaaggtctttccggggcttggttgtcaaagccgccaccgttgttgcccccaaatacaccgcgattaagcctctgggagacagagtgctgataaaaatta

SEQ ID NO: 49987 - DNA, 381 bp, Glycine max
  unsure at all n locations
  Clone ID: LIB3167-027-P1-K1-C4
gcggattaccaaaccctcttcgtttttttttttccgccctttttttttttagggccggccggtcgtttctttctctctcctcaaccggagacagcgtcgccttcttttctgaatctcgcggtgttgttagttctgcggcggttgtagttccggcggcgatgggacagcaatcgttgatctacagcttcgtcgctcgcggcaccgtgatcctagcggagtacaccgagttcaccggaaacttcaccagcgtggcggcgcagtgcctncagaaactcccttcctccaacaacaagttcacttacaactgcgatggccacaccttcaactacctcgttgataacggattcacttactgtgtggttgctgttgagtctgctggac

SEQ ID NO: 49988 - DNA, 384 bp, Glycine max
  Clone ID: LIB3167-027-P1-K1-C5
gtaaaggcgaaagactttaggtttggaattgggaattagggttgttcgcgtcgcggaggatgatcgaggtggtgttgaacgatcgattggggaagaaggtgcgcgtgaagtgcaacgacgatgacaccatcggcgacctgaagaagctggtggcggctcagacgggcacaagagccgacaagatccgcatccagaagtggtacaccatatacaaggatcacatcactctcaaggattacgagatccacgacggcatgggtctcgaactctactacaactaaacacaaggtgtgttttatgcatgatatattactatgatctgggaatgggatgaggcgccaaatgtaattttgacttgcgaaagtccctatgatttgaataatg

SEQ ID NO: 49989 - DNA, 336 bp, Glycine max
  Clone ID: LIB3167-027-P1-K1-C7
cctacgcatacgtttattctttgttttattaaactggacataaaaatcggtggggattctatcaaaggacttcaaaaacactctgaccaaaattaaataagtcttgcaggattaactaaaaagagccagcattaattcaacatatattataagttacaaaccataccgaaacaatgatggaatcaatctctcacaccctcaaaccttacgataaaaggaaattttcaacagcaatgtttttaactatatgttcaacaccaactccatcctctataaacctggtgaacatccaaaccatgaagttcacattaattttgcaccttactctttttacag

SEQ ID NO: 49990 - DNA, 373 bp, Glycine max
  unsure at all n locations
  Clone ID: LIB3167-027-P1-K1-C8
cccacgcgtccggcatcatcatttgtgggtactttattacccaaccactgcagacaaaccaaacactcagctgntcctgcaagtagatcaggtgctccaagaaggaggagagtgcacttagcaacaacaagagcagagaccatgactactgtcatagaaaaactgggcattaagattgagaggaaccctcctgagtccaagctcactcaactgggtgttaggcaatggcccaagtaatatactacttcttttctttactatataataatatttctctttttagtttccttgtaatttcttttttccatttgatttcaattattctagtggtatttatttagtttctccttttattatgcctatgaggttagga

SEQ ID NO: 49991 - DNA, 254 bp, Glycine max
  Clone ID: LIB3167-027-P1-K1-C9
aaaaaaaaaaaaaaaaaaattatatttaaaaaaaaaaaaaaaaaaaaaaggagaggataattaaaaaaaaaaaaaaaacgccccccactctttaatttccaaccttccttacccatccatgcaacataaataactcttctattgagccacctaatttcgttccccttcccataagattcacaacttctttcctgtgaaaaccctccctttccctctcttaatcgccttccaaaacattctcctttcccctgttt

SEQ ID NO: 49992 - DNA, 290 bp, Glycine max
  Clone ID: LIB3167-027-P1-K1-D1
gacccacgcgtcgtcttttggctgtgcccaatctaatctctaactctttacgactgcttgtaagcccttagcattttacacccattaagaatatggcagcagcagggaaagctccgtgatggaaggagggcaccttcacagaagaattggagggttgcaagaaagaagcaggagctaaaggggggagtagagatgcaggaatgagggctgagaggttattggtaataaagtgatagtaaatggacaaaggctgagaaactgtgggtggtcacagagggggataacatcat

SEQ ID NO: 49993 - DNA, 379 bp, Glycine max
  unsure at all n locations
  Clone ID: LIB3167-027-P1-K1-D10
accgagagtgcttgagaaatcatgcagccagcctaggaagctacgccacggacgggtgcggcgagtacacggtggacggcncggngggactacaatgcgccgcgtgcgggtgccaccgcaacttccaccggaaagtgaagtacctggcggcggctgaaagccctcccacggagtatgggggcagcaacagcaagaagcggttcaggtctaagttcacggaagatcaaaaggagaagatgctagggtttgcggagaagcttggttggaagcttcagaggagggatcttgatgatgagatagagagggtttgccgaagcgttgggggagtaggcaagtcttcaaaggttggatgcattaccattagaactttttcttcttc

SEQ ID NO: 49994 - DNA, 187 bp, Glycine max
  Clone ID: LIB3167-027-P1-K1-D11
gcttcatcgcctacaagcccccagtcttctaagtgtgaaaaatttgcagggcgggtgtagccgccaccccactttgtttgtttgtacttaaactacattcccatttgtttttgctttttgagatttcatcatcctgtatttttggtttctgttttcggacttcaatggaaattaatggatgagaact

SEQ ID NO: 49995 - DNA, 269 bp, Glycine max
  Clone ID: LIB3167-027-P1-K1-D12
cccacgcgtccgcatcctgtatttttggtttctgttttcggacttcaagggaaattaatggatgagaactaatgaataaaaaaaaaaaaaaaaaaaaaaaaaaaaaaaaaaaaaaaaaaaaaaaaaaaaaaaaaaaaaaaatataaaaaatataaaataaaaaaaaaaaagaatacaaagaaaaaaactctaatatagagtaaaataaattcaatttatagggcgggtgtttaaaacatcataactgggaaaactttaaaattcccaaa

SEQ ID NO: 49996 - DNA, 370 bp, Glycine max
  unsure at all n locations
  Clone ID: LIB3167-027-P1-K1-D2
agcttgaaacaggacccacatccacaagctgaggctgtgtgtgtcagtggatggaaaatggggacttgtgggattgtcttgttgaccacagcttcccctaagccattggccacttcggagttcgtcaccacgcgctcttnccgttccccgcattcgctgctgctctgtttcagagctttccccagataagcttccaactagtattgatttttctgtaactggtggggcatatgatttctcaaaaggcaacaacatcactaacaaatgagttcatctcttcaccaaagaaagtaactcttttaaggcatggtcttagcacttggaattcagaaagtaggattcagggaagctcagatttgtctgtattaac

SEQ ID NO: 49997 - DNA, 392 bp, Glycine max
  Clone ID: LIB3167-027-P1-K1-D3
ggggcgggccgcgcgtccgaggcaagtaagtctcagcgtgagtttagggtgttcaccacagtttacactcacgagagtacccattttctcttctcaatttctcaagtgtgccgagaaaatcatggtggacgcagcagaacgtatatacttggaggatgatgattcatctctcatgaaaactatcaagggcgcaacaactggtttagtggctggaactatctggggtactgtagttgccacctggtatgatgtcccccgtgtcgagagaaatgttgctcttccagggctgattatgactatcaggatgatgggcaactattgtttgacctttgctgccataggaggagtctacataggtgtagagcagttggtgcagaactatatgatgaaga

SEQ ID NO: 49998 - DNA, 384 bp, Glycine max
  Clone ID: LIB3167-027-P1-K1-D5
aaacagtgtgatgaaaatgaaggtcctggttttcttcgttgctacaatttggggaggggtggcaatgccatgcgtacgatatgttccctctccgaatgaacactggctatggtgcccgtactccggaggtgaaatgcgcaagttggaggcttgctgtggaagcacacaacatctttggctttgagaccattcctgaagagtgcgttgaagcaacaaaggaatacatccatggcgaacaatatagatcagactccaaaacagttaaccaacaagcttacttttatgccagagacctcgaagtccatcccaaggacacatttgtgttcagtatagatggcaccgtactctctaatattccatactacaaaaaacatggatatgggg

SEQ ID NO: 49999 - DNA, 174 bp, Glycine max
  unsure at all n locations
  Clone ID: LIB3167-027-P1-K1-D6
tccaaggctttttagggaaatgatagtactcgagttaggattctttatgctgttctttggcccattcatagtttggtgggnnaatcaactttgtctcacaatctttgtgtaaaattgaaaatactatgtnggcttaacttggactatcactactaaaggttggcgctgaccatt

SEQ ID NO: 50000 - DNA, 374 bp, Glycine max
  Clone ID: LIB3167-027-P1-K1-D7
cccacgcgtccgcccacgcgtccggccaattccattcagatcacagtcggttgaattcctgctgcagcatactgtgtgcaacaaagccctaaaatggaggggactggcttcactcctgcactgcaagaaattgagcatgtaaagtctgatcaaggagaaattctgagcaagcctttcttggatgcgtgcaagcacatattgcctgtaatagataagtttggagctgctatggcccttgttaaatctgacataggtggtaacatatcgagattggaaactatgtattcttccaatccatccagatttaactacctgtacagtttggtacaggtagaggttgaaactaaaacagctaaatcatcatccagttgtac

SEQ ID NO: 50001 - DNA, 372 bp, Glycine max
  Clone ID: LIB3167-027-P1-K1-D8
gcctcttcacgcttccctcagctggtttcccctcaaagggtagtttcactccggacaacgctcccatctctgaacgcatccccatccacagccacgcctacaccatatgccccgccaccgcctccgtccgcttcctctcccgccggcgtttcgaaggcggcggagttcgtgatctcgaaggtggacgatctgatgaactgggcccgccgcggctccatctggcccatgaccttcggcctcgcctgctgcgccgtcgaaatgatgcacaccggcgccgcccgctacgatctcgaccgcttcggcatcattttcaggcccagccctcgccagtctgattgcatgatcgtcgccggcactctcaccaacaagatg

SEQ ID NO: 50002 - DNA, 372 bp, Glycine max
  Clone ID: LIB3167-027-P1-K1-D9
aaaggagtctatagtttatcttattaaccagcctcatatggtgaagtcgagtggatgtatatgtgaggtgatagataatcttgcatatcagcatcccaccacctttttagttctcagttatgatatttagagagcattagtaaaattagtatgagctggttgttattgcaattggatttcttttttatcttagaaaaccaagtgttctttcaaaaggagaggaaaaagaaaaatagctttctgttttggcttgtctcagataggaagttctgtgtagtctatttgtttgtcatttattttataggtttacaagaacaactttgagtactgtaacggcttgttgctacagttgtaatttccccttttgtgaac

SEQ ID NO: 50003 - DNA, 96 bp, Glycine max
  Clone ID: LIB3167-027-P1-K1-E1
caaaaagttctgaatgcttttaatttgtatcagtatttggaagaattaggaaggtgaacaatctattttaagcctacttcataggtttttcaactg

SEQ ID NO: 50004 - DNA, 376 bp, Glycine max
  Clone ID: LIB3167-027-P1-K1-E10
cccacgcgtccgctgagaacaacattccacactcctctctctctctccggttgcttctcttctcacacctccatggcccacacttcccttccctccgccgatgccggcatggacgctgtccagcgccgtctcatgttcgaagacgaatgcattttggtggatgagaatgaccgtgtggttggtcatgattcaaaatacaattgtcacttgatggaaaagattgaagctgagaatttgctgcatagagctttcagtgtattcctgttcaactcaaagtatgagttgcttcttcagcaacgatctgcaacaaaggtaactttccctcttgtgtggacaaacacctgttgtagccatcctctgtaccgtgaatctgagc

SEQ ID NO: 50005 - DNA, 374 bp, Glycine max
  Clone ID: LIB3167-027-P1-K1-E11
caaaagtttttgaaatggtgtcactccttcttctatttctatgcctagggctgcctttgtttttgttgtccttcttcaaataccgtaaaaccttcaagaatccaccacttccaccaggtcctagaggccttcccataatagggaatcttcatcaactagatagtccttctcttcatgagcagctatggcatctctcaaagaaatatggtcctttattttcccttcaatttggattaaggccagccatagttgtttcctctccaaaattggccaaagaggtaatgaaagacaatgaccttgagtgctgtggacgacctaaattactaggccaacagaaactaacctataatgggttagacatgggattttcctca

SEQ ID NO: 50006 - DNA, 377 bp, Glycine max
  unsure at all n locations
  Clone ID: LIB3167-027-P1-K1-E2
ttgaagctaagctgacccagctgagtaggtcccaggctgattacatcantggggctggtgagggtccatacaagcctgctcacttacaggtactaagtgattgagatgatcaactgaaaagtgagtgagggaaagacaaaaatcggttttatcaatcggatttgattgtttaattttcctttttttgatttttggtgttagacttttcagatttgtggtagaagaattgtagccatttttatttctgtagaactttttgttcgagtgggtgggaccagtaaggaggaaggcggcatcctgttggtttctgtgatatgaaaccaatttgggttgaataaggcttgttttgttttggggatgtgtgcattttgctttat

SEQ ID NO: 50007 - DNA, 398 bp, Glycine max
  Clone ID: LIB3167-027-P1-K1-E3
ccggggcggccgacgcgtccggtttttaattaataatgtaaaagaaaagccatagtctccctctcttaagcccggaacgctcatctccaatctgcaaatccaactaacatgggaagccagcaagccgccgtgtcgttcctgacgaacctggcccgcgccgctttcgggctgggcgcctccgcgaccctattgagctcctccctctacaccgtcgatggcgggcagcgcgccgtcctcttcgaccgtttccggggcatcctcgacgagaccgtcggcgaggggacccacttcctcatcccgtgggtccagaaaccctacatcttcgacatccgcacccgcccccacaccttctcctccgtctccggaacaaaagacctccagatggttaacctaaccct

SEQ ID NO: 50008 - DNA, 378 bp, Glycine max
  Clone ID: LIB3167-027-P1-K1-E4
ggacactgctgggctttcggccgacccataaaccttcgccagaaaccgtgagggcgaagtgatccactccaggtgggccatgctcggggccttgggctgcgtcttccccgaactattgtcccgcaacggggtcaagtttggagaagctgtgtggttcaaggccgggtcccagatcttcagcgagggtgggctggactacttgggcaacccaagccttgtccacgcccagagcatcctcgccatctgggccacccaagttatcctaatgggtgctgttgagggttatcgtattgctggtgggcccctcggtgaggtcactgacccaatctaccctggtggcagctttgacccattgggccttgctgatgacccagaggc

SEQ ID NO: 50009 - DNA, 218 bp, Glycine max
  unsure at all n locations
  Clone ID: LIB3167-027-P1-K1-E6
ctaaaaaccttcccttctcttcgcacccccacactcccatctcacacacccctggcagtgcaacaatgtctctcaccattccctccaacctctccaagcccgnncgcctttcgcccaaactaagcccaaagctaaggtccgccgccacaaccaccatcgtctgcagcaccaccaacaacaacaacaacaacaacgtgttcttcgacctgaaggcgttc

SEQ ID NO: 50010 - DNA, 375 bp, Glycine max
  Clone ID: LIB3167-027-P1-K1-E7
cccacgcgtccgcccacgcgtccggttcaacttactgctacattataccgacgaccaggttacaatccatcaacagatggccctttgccatgcctggtttggtcttacccaggagaatttaagagcaaagatgctgctggacaagttcgtggttctccaaatgaatttgctggaataggctccacatcagcccttctttggctggctagaaggtttgcaattctatctgggcctaccattcctattattggcgagggtgatgaagaggcaaatgataggtatgtagaacaattagttgcaagtgcagaggctgctgtggaggaagttatccagcgtggggtggctgatccgaagaaaatagctgttggtggacat

SEQ ID NO: 50011 - DNA, 274 bp, Glycine max
  Clone ID: LIB3167-027-P1-K1-E8
cccacgcataccgaaaccgttgcgattactgctagatcgccgatctctgggcgtttttttgtttgactgtgaatgacttctctaacctgaaaatctacttcatgatctggtcactcaggctccggaaccgcctctacgtgcttcacaccatgccgacacttaaaccaacacccagacttgagctataccccatcaaccaccacatgaacactagcatattgaccaaccaccaatctaacgctcaattcaatgagtgctaccaatgacatgtgtc

SEQ ID NO: 50012 - DNA, 374 bp, Glycine max
  Clone ID: LIB3167-027-P1-K1-E9
cccacgcgtccgcgatgatgaggtcaaagatagtgttgtttggagactgcatgacggagcaatcgatccgagagaatggatggggtgttcctcttgccaatgcctattctcgcagggctgatgtacttgttcgtggttatggtggatacaacactaggtgggctatgttcttactgggccatctcttccctctggactcaactaaaccacctactgctaccacaattttctttggcgctaatgatgcagctttgttaggaagaaccagtgaaaggcaacatgtacctattgaagaattcaaagagaacctcagaaaatttgttcgacacttaaaggattgctcaccaactatggtaattgtgcttattactcca

SEQ ID NO: 50013 - DNA, 376 bp, Glycine max
  Clone ID: LIB3167-027-P1-K1-F1
ccaatgtcaaaccgaggtcgcggaggatcggcagggaacaagttccgcatgtggctgggtctgccggtggcggcgacggtgaactgcgccgacaacaccggcgcgaagaatctctacatcatatcagtgaaggggatcaagggaaggctgaaccggttgccgtcagcttgcgtgggtgacatggttatggccaccgtcaagaagggaaagcctgatctccgtaaaaaggtgctccccgctgtcatcgtccgtcagcgcaagccgtggcgccgaaaggacggtgtttacatgtacttcgaagataatgctggggtcatagtgaatcccaagggtgaaatgaaaggttctgctatcactggtcctattgggaaggagt

SEQ ID NO: 50014 - DNA, 375 bp, Glycine max
  Clone ID: LIB3167-027-P1-K1-F10
agtttgttgtgagctataagctagtttatcgtgaggagaatatgaagtggggggttttctttgttgctgcagtagttttggtagcatggccatgccatggcgcaggctaccaaaggttccctctccgaatgaaaactggctatggtgagcgttcttcggaggtaaaatgcgcaagttttaggcttgctgtggaagcacacaacatccgagcctttaaaaccattcctgaagagtgcgttgaaccaacaaaggactacattaatggcgaacaatttagatcagactctaaaacagttaaccaacaagctttcttttatgctagtgaacgcgaagtccatcacaacgacatatttatattcggcatagataacaccg

SEQ ID NO: 50015 - DNA, 276 bp, Glycine max
  Clone ID: LIB3167-027-P1-K1-F11
cagagaagagtgaaaacatcgggtttggggactctctgcttccctctagggcgcaccatggcaatgtgggggctattgttaggagcagaatcaaaaacacatgtcggagatgcagaggttctgaaggagctgaagcaaggtttggagcctggttcggtgaagccaggctcgtgcgtgagctcctgggacttcaccttggacccatgcgacaaccttttcggcgacaagttcacgtgtggcttcagatgcgacgtcgtcgtttcggggctgagtcga

SEQ ID NO: 50016 - DNA, 202 bp, Glycine max
  Clone ID: LIB3167-027-P1-K1-F12
cccaaccctacggaaactcttattcttcatcgcaacggcctgacatatcatggccgctcaccccaccaccaaattatactgatgcaaacaaggcacaatctccatgtccctaaccccacccccctacgaaccttcaaaacttcaaatttcaccccataaaagcatccatcagtgtcacaggaaacgacgctccatatacatg

SEQ ID NO: 50017 - DNA, 378 bp, Glycine max
  unsure at all n locations
  Clone ID: LIB3167-027-P1-K1-F2
ncaacccgtccggcccaattggacaagcatttctctttactatatgttcttcggaaggaccacattgcagatgatgttgattacaaggtccttgttttctgcacaactgctatggtcactagacttgttgctgaacttcttggtgagttgaacttgaatgtgagagaaatccattcaagaaagcctcagagttacagaaccagagtctctgaggaatttcggaagtcaaagggtctcatcctggttacttcagatgtatctgcacgtggagttgattatccagatgtcactcttgttatacaggttggtttgccagcagatagagaacagtatatacatagactcggtagaacagggcgaagagggaaagaagggcag

SEQ ID NO: 50018 - DNA, 384 bp, Glycine max
  Clone ID: LIB3167-027-P1-K1-F3
cgagagaattgtaaatgaaacttgaagagtacttttacgatagtgagaggaggaaggggaggaatagtgcccttagtttggaagagttgtacaagaagcagcatgaagagaaggagaaagaaataatggagagagaggctgtcctgagggtaaagaaggaagagagagaacaagctgaagctcggagaaaggctatgcgagaaaaaatgcttaagaagacacgaaaagggcagcctgttatgaaatacagaattgagcatctcttggagactattcaaggttcaactaaaaatgcagctggcagtaaatcctgagtcgtggagtagaaaaagggccaatcgtgacgtctattcggtgagccagcttgagtagaacagttactga

SEQ ID NO: 50019 - DNA, 380 bp, Glycine max
  unsure at all n locations
  Clone ID: LIB3167-027-P1-K1-F4
atacagtactcctaactagctataccctggttaatccatggagaaagaagcggggggccttgaaatcactactgagctaaggttgggccttcccggtggggaattacctgacaagaacgagaagataaagaagagggtgttctccgagattcaagctcatgatgatgatgaaaacagttcctccgaacaagaccgcaaaatccaaaccaagaataaagtggtggggtggcctccggtgtgttcgtaccgcaagaagaacaccgtcaatgaaaccaaaatgtacgtcaaagttagcatggacggngctcctttcttgcgtaaaattgatttagctatgcacaagggatattcggagctggtcttggccttggagaagttct

SEQ ID NO: 50020 - DNA, 220 bp, Glycine max
  unsure at all n locations
  Clone ID: LIB3167-027-P1-K1-F6
cctaaacacctttttggggcggcttaccaagggacacgcnaccaataccgtttttttcaccttcaacaaggttaacccagtgcaaccaaacattatgctccaaaaagatgcttgtatttcatcctgtggggagttacaacttaccaaaggtggcagcaactgtgtgcccacctcgggaactatcggtcgagccctttacgcttgcccaagacaaatttgg

SEQ ID NO: 50021 - DNA, 371 bp, Glycine max
  Clone ID: LIB3167-027-P1-K1-F7
cccacgcgtccgacgcaggaggaggtgattgatcgagagaagagaagatgactgcgcgcttcaagaagaacaggaagaatagaggccacgtgagtgccggccatggccgcatcgggaagcaccggaagcaccctggaggacgcggtaatgccggaggcatgcaccaccaccggatcctctttgacaagtaccaccctgggttcttcggcaaggtcggaatgcgctattttcacaagctccgcaacaaattctactctccgatcctcaacatcgacaagctctggtccctggttccgcaagaagtgaaggacaaggccttcaaggagaacaaggcgccgctgatcgacgtcacgcagttcgggtactttaag

SEQ ID NO: 50022 - DNA, 300 bp, Glycine max
  Clone ID: LIB3167-027-P1-K1-F8
cccacgcgtccgcccacgcgtgcgtccacgcgtccgcccacgcgtccggaaggggaaaagccttcaatcatatagcattctaagaaatgaagagccctaccattttcattctctttctactttctgccttctacacctcactcctaccttcagccaccgctcaagtcgtggttgacatggaaggtaatgatcttcaaaatggtgggaaatattatgtgttgccagtaatagagtcatcatatggtggaataagagtagccgcaactggaaaagaaagatgccctctcactgttgtacaat

SEQ ID NO: 50023 - DNA, 395 bp, Glycine max
  Clone ID: LIB3167-027-P1-K1-G1
atcgcatctgaatatatctaatgcagaaaaagaagaccgtgcgttgaaatctaccagggacgagatccaagcagctttgttttccttgccagaatttgcgctcttcttactatcatcaagatactaaatggaatatcgatggacgaatggtaggcaggaaaccggtggccgtgacagaaggcaatctaaaagggaacaggcatatcaggactctcttattgaggatttgtcagaggattttagtttgccaatcaaccacaggccaacagaaaatgttgatctggataacgtggagcaagcatctttggacacacagataacatcatctaatattggctttaagctcttccaaaagatgggatggaaaggaaagggtcttgggaaggatgaacaag

SEQ ID NO: 50024 - DNA, 367 bp, Glycine max
  Clone ID: LIB3167-027-P1-K1-G10
ccatgaactttgcatctttctatcatcacatccatggccgcgagttgtgaagctccacgttttcccagaaagtttgaaccaacacaaaacgaggttgctcaggagaggctttggctcatgcccttcacctggggtgcttggttttggccataaaaattatgatcagttctctgtgaaagtgtgcagggcttttaggactgaggatggtggggatgtgaaggagaaaaagtttcgaaatttgaagaaaaatgaagagaaaaccaaaagggaaagtgggttttggagttccctcaagtctatcttgctgaggaatttcatggtgggttcaaaatcagatgatgagtatcgccaagctgtggtcaaggtg

SEQ ID NO: 50025 - DNA, 377 bp, Glycine max
  Clone ID: LIB3167-027-P1-K1-G11
cccacgcgtccggaagttggaagtcatggcagcaacattgatggcagcggcaggaagttctggtactcttaaagcaactcctttccttggccaaggcaagggtgccaatgccaatgctcttagggatgttgtctccatgggaactgggaagtacaccatgggcaatgatttgtggtatggaccagacagagtgaaatacttgggacccttctcagctcagaccccttcatacttgaaaggagaattccctggggattatggatgggacactgctggcttatctgctgacccagaagcatttgccaagaacagggctcttgaggtgatccatgggcgatgggccatgcttggagcactaggatgcatcaccccagagg

SEQ ID NO: 50026 - DNA, 274 bp, Glycine max
  Clone ID: LIB3167-027-P1-K1-G12
cccacgcgtccgcacacatgtccttcatgctgactggtccaaagattcgagagaggtatatgtaggggacataatcaaagtaagagttgagaatatagaggactatggtggctcatgggcatatgcgcttgcttgactgactttatcactttactggactaatacacgtctaacaagtgtcatgggatctaatgcacgatgtcagcgatatgttaacagcaggagatgaaatgagggccaaagttgtaggagttgctaggggaaaatacaaggt

SEQ ID NO: 50027 - DNA, 375 bp, Glycine max
  Clone ID: LIB3167-027-P1-K1-G3
ctgatcattagataacttatcacattatgcaggcagcagcaacaacaccactgtatcaactcgtgagcttcaagccaaagcttcaaactttcccttcaaaatctcaactttgccccttggggacccctttctgcagactaggaatggcttctgtttctgggtttaggttgagacccctgagggctgtgggtggttcttcatcatcttctgcatcaggtgatgatggatttgtcacactgatagagtatgtggcgaaggaaggaatgaatgtgaaagatgatttggtggtgttgcttgatcacattcagtatgcttgcaagagaattgcagcacttgtggcttctcctttcaattacagccttggcaaacaaactg

SEQ ID NO: 50028 - DNA, 74 bp, Glycine max
  Clone ID: LIB3167-027-P1-K1-G4
cccacgcgtccggataaattgaattttaaagcctagaaagcttccaaagcagggcaacgtgttttgaggaattg

SEQ ID NO: 50029 - DNA, 110 bp, Glycine max
  Clone ID: LIB3167-027-P1-K1-G5
catttgaagaactttgatgtttgatgggtttgtaataatgtcccttgaaaatggggggggtttgtgttgaactcaattgtgtcccattaataatagtactctaatatccc

SEQ ID NO: 50030 - DNA, 373 bp, Glycine max
  Clone ID: LIB3167-027-P1-K1-G7
aaccccaccaagctcgtaccatcaaaaccttcccttcaggtcaaccttggaaagcgcctaatagcctcacccgaaaacaccaaactttccactgcgacagcaatcgcaggagcaatattcacaaccctcggaacctgcgacgccgctttcgccgttcaacaaatagccgacatagcagaaggcgacaaccgcggtctggcactgttgctgcccataattcctgcaatagggtgggttctgttcaacattctgcagccggcgctgaaccaactgaaccgcatgcgcagcaccaaaggcgtgatcattgggttggggcttggcggcttggctggcttggtggctgcgccgcatgcatcggcggcggcggcttctg

SEQ ID NO: 50031 - DNA, 372 bp, Glycine max
  Clone ID: LIB3167-027-P1-K1-G8
aaaaacgtgcattaatagtatatacatgagctttcacaaggtcaatgcgcgggtggcattgcttggcaccacgatcgaactctactataccaaaactatctcattaactctaattaactctttgtacaccatccaactgcctatctttcaaacatttatcattcaaccctactaacatcaaaatctgcttcatttcttatccatactttaatataaaacatgttgaactcccaaagcactatatatcaacacgatactcatgactatattcaatagatgggtacgcgtttgcaaaaagaacgccatcgatcttggcgacgacaatttcactctgtcctactacaccaatataccttaccagcctgttctttc

SEQ ID NO: 50032 - DNA, 302 bp, Glycine max
  Clone ID: LIB3167-027-P1-K1-G9
aaaaaaaaaaaaataaaaaattagatataaaaaaaaaaaaaaaaaaaaaaaaaccgtttttttaaaaaataaaaaaaacaaacccccccctttttaaaatttccaaccttactttccctttcatccaacctcataccttttctttagtgtcacctattttctattcattgcccctccttttccaactttcctcctggtaaaacccttcctttccccatctaaatccccttccattactttcccttttcctcatttcccttattacctaatagtccctcacctttttccctttccaacatttt

SEQ ID NO: 50033 - DNA, 296 bp, Glycine max
  Clone ID: LIB3167-027-P1-K1-H1
cgaagttgcaggtagagcagatttaaacgttatttatgggcggacatggtaatgtcaggtgctttttatccaggtgcacttaatgggctacttagacgtactgtgtctgacactgttctctgtctcaagtcattgcgatgcactcactgctcgagagactggagtactgcagccgcgacagcacagtatcagtacaagagtgtctgcttgcgatttgacggatcgtgcacaacactacgtgaggaagaagactagagtcgatgacatgcaccttgatcatacattcatagtcagag

SEQ ID NO: 50034 - DNA, 349 bp, Glycine max
  unsure at all n locations
  Clone ID: LIB3167-027-P1-K1-H10
ccggaacggaagggccgggccgacccacgcgtacgtccacgcgtncgntttatttcactgtttaaaacatgagcatataaatgggtacgctttatattatctatctttatattatctataaagggtaaagatatccgatgtgaatctatttgtttagttttctatcggtatgtatataggtgaataatccaacatgcctttttgtgaagtaaaaaaactaccctcgatccatgcctcaaaagggttgataataagtaaaaaaaatcaatgaatttataataaaaaaacgcaaaaaggttttatcatgaattcattgatttttttcccacgcctccgttctagatcgcga

SEQ ID NO: 50035 - DNA, 280 bp, Glycine max
  Clone ID: LIB3167-027-P1-K1-H11
gtagataactagaaacagtgtgatgtaaatggaaggtccttgttttcttcgttgcgtcaattttggtagcatggcaatgccatgcgtacgatatgttccctctccgaatgaacactggctatggtgccccgactcccggagggaaaatgcccaagttgaaggttggctgtggaagaccacacaatttttggctttgaaaccattcctgaaaagggcgttgaaccaccaaaggattacatccatggcgaccattttaaatcagattccaaaacagttaacc

SEQ ID NO: 50036 - DNA, 242 bp, Glycine max
  Clone ID: LIB3167-027-P1-K1-H12
cgcgtacggaagaagggggcgaggaagattattttttcttggtgagttaccttcacgaggagaggaatggggagtcgaggtttttggtgatggaccccaagtctccggagctagatgttgtggcggcggtgaggctttcgcggcgggtgccgtacgggttccatgggctgtttgtgaaagagagtgagctgaggaaagtgtcgttgtcgtgaagctgagacatgatggttcgtgtggtgggc

SEQ ID NO: 50037 - DNA, 379 bp, Glycine max
  unsure at all n locations
  Clone ID: LIB3167-027-P1-K1-H2
cggccttggccacttccaactttttttttgttttttccgtctccttagccttctgttgggggctacttaccaaggcacactcaaccgataccgtttctttcaccttcaacaagttcaacccagtccaaccaaacattatgctccaaaaagatgctagtatttcatcctctggggtgttacaactcaccaaagttggcagcaacggcgtgcccacctcgggatctctcggtcgtgccctttacgctgccccaatccagatttgggacagcgaaaccggcaaggtagccagctgggctacatcctttaaattcaacattntcgcacccaacaaatcaaactcagctgacgggcttgccttcttcttggcacccgtccggtc

SEQ ID NO: 50038 - DNA, 348 bp, Glycine max
  Clone ID: LIB3167-027-P1-K1-H3
ccatgaactttgcatctttctatcatcacatccatggccacaggtgggaagctccacgttttcccagaaagtttgaaccaacacaaaacgaggttgctcaggagaggctttggctcatgcccttcacctggggtgcttggttttggccataaaaattatgatcagttctctgtgaaagtgtgcagggcttttaggactgaggatggtggggatgtgaaggagaaaaagtttcgaaatttgaagaaaaatgaagagaaaaccaaaagggaaagtgggttttggagttccctcaagtctatcttgctgaggaatttcatggtgggttcaaaatcagatgatgagtatcgc

SEQ ID NO: 50039 - DNA, 178 bp, Glycine max
  unsure at all n locations
  Clone ID: LIB3167-027-P1-K1-H5
ccgtaacggaagggccggcccaggcgtccgnacacttaaagggtttgggaggagggatttcttaaaggttgttgttaggcggcgcgcgtttgtttacattggccccccctcctctggaacatacccttggttccaaaagttaaggcaggggcttgtggcctatgcattggccattggg

SEQ ID NO: 50040 - DNA, 202 bp, Glycine max
  unsure at all n locations
  Clone ID: LIB3167-027-P1-K1-H6
gaccggaanggaagggccgggccgagcgacgcgtaaaggaataagggccgctccttcctattatcttttaattgctggggacaccttttggcgtgggggcgattgaaagtggcacacaccaaacgtgaaagccaagaccattatgcctgcaacccttcaataaggagtggttttttccttctcggttttctattttggaata

SEQ ID NO: 50041 - DNA, 376 bp, Glycine max
  Clone ID: LIB3167-027-P1-K1-H7
gctagtttatcgtgaggagaatatgaagttgtttgttttctttgttgctgcaggagttttggtagcatggccatgccatggcgcaggctaccaaaggttccctctccgaatgaaaactggctatggtgagcgttcttcggaggtaaaatgcgcaagttttaggcttgctgtggaagcacacaacatccgagcctttaaaaccattcctgaagagtgcgttgaaccaacaaaggactacattaatggcgaacaatttagatcagactctaaaacagttaaccaacaagctttcttttatgctagtgaacgcgaagtccatcacaacgacatatttatattcggcatagataacaccgtactctctaatatcccatac

SEQ ID NO: 50042 - DNA, 380 bp, Glycine max
  Clone ID: LIB3167-027-P1-K1-H8
caaaaggccatataatttttttttatttgaaataatgtccgggatcatccacaggattgaggagaccctccatgtgggagggcacaagaaagaggagcacaaaggagaacaccatggtgagcacaaaggtgaacacaaaggagaacaccatggtgagcacaaaggtgaacacaaaggagaacaacaccatggggagcacaaggagggacttgtggataagatcaaggacaagatccatggtgatggccatgacaagggtgagaaaaagaagaagaaggacaagaagaagaaggagcatggacatgaccatcatggtcatagcagcagcagtgacagtgattagatcttatatgttaagcaggtgtacggtacgatggtag

SEQ ID NO: 50043 - DNA, 376 bp, Glycine max
  Clone ID: LIB3167-027-P1-K1-H9
ctctttctggctattctgtgtttagcaatgttgacatttttccacaagtaagtctgaacttcgctggtggtgcatctctggttttaagaccacaggattaccttatgcagcagaattatattggcgagggatcagtgtggtgtattggctttcagagaattccggggcaaagtataactattctaggagacctcgtattaaaagacaaaatttttgtctacgatcttgctggtcaacgcattggatgggctaactatgattgttcattgccggttaatgtatctgcatcagctggtaggggcagaagtgagtttgtggacgcgggagagctaagtggcagctcttctttacgtgctgggcttcacatgttgataaa

SEQ ID NO: 50044 - DNA, 326 bp, Glycine max
  Clone ID: LIB3167-029-P1-K1-A1
cccacgcgtccgcccacgcgtccggcaccttaccttattccaatccaatagcaaggaggtaccaaaatagtgtgattcatggctgcaacgaatgcgtcaatctttgcatcttccacgcaaccatgcttgcctgtgcctcctaccattccaaacacgcttgctactccttttctcaatgtttcgtcaccaagaagttaccttgtgaagaaaaagcatgtgaaatttagcaaaaaaatcagtgctgctgctgttgcaacaacaacaacaactgaggaaattcaagagtacaagcttccatcatgggctaagtttgaaattgggagggc

SEQ ID NO: 50045 - DNA, 307 bp, Glycine max
  unsure at all n locations
  Clone ID: LIB3167-029-P1-K1-A10
acggagctaacacactggacttttttttcataacttccaccaccgtcgtgggcgggttttactcattattttctgctactccacactacaacaaccgtgtttgaaggactacaaaagtgagcataccatggctttgtccctttcttatgcaatcacaaagccatttttgagggtccaagacagaagcatcatgaactgtgaacttcagagacccaaaaatggnnggggagctacgataaggtgtgaatcaaaagagtcatcattatagttgccagaaaaacatttcaagttggagatagggtcaccc

SEQ ID NO: 50046 - DNA, 88 bp, Glycine max
  Clone ID: LIB3167-029-P1-K1-A12
cgaatattaactgatgttattcaaatctttaatgagacaaagtagggcgggcaatttacttacccaaataaagggaaaatttgtattc

SEQ ID NO: 50047 - DNA, 351 bp, Glycine max
  Clone ID: LIB3167-029-P1-K1-A2
cccacgcgtccgcctagcacccatgttgctgctggagaaccacccaattcacctgaaccctgctcactacatcagtgagattattagagaaggcacaaaaaatggcactgctttctttaagtgccatggacatgagcaatttgagatgacgggtttggatcctgagtataataggttgttcaatgagggcatggtgtgcactgctagggttgtgtccaaggctgtgatcactggctacaaagatgggttcaaccagattaagtccttggttgatgttggaggtggcattggagggtctctttcggagattgttagggcttatcctcatatcaatgccatcaactttgactt

SEQ ID NO: 50048 - DNA, 240 bp, Glycine max
  Clone ID: LIB3167-029-P1-K1-A3
gcacggactactctgaccaatcataaccaaatatttgatggccgcgacctggacaaacagcctgatgtggaatctccaggcccacaacttacctcctgcgtcttgctaactatactcacgaactgttcattccacccgaaatttcactgctactgaactctgccgtggggtggtatccatgggaggctctaggaaggtctgcgttggaggcaagtgctagctatatgggaccaaacactc

SEQ ID NO: 50049 - DNA, 355 bp, Glycine max
  Clone ID: LIB3167-029-P1-K1-A4
cccacgcgtccgcatcgcactgtacgtctgtaccataacttccaccaccgccggcggcgccgatcaccaccatttccggcgactccacgctacaacaaccgtgtttgaaggactacaaaagtgagcataccatggctttgtccctttcttatgcaatcacaaagccatttttgagggtccaagacagaagcagcatgaactgtgaacttcagagacccaaaaatggtgttgtagctttgataaggtgtgaatcaaaagagtcatcatcagagttgccagaaaaacatttcaagttggagatagggtcacccattattttcattgaagctcccaagatgatcaagactgcagctac

SEQ ID NO: 50050 - DNA, 350 bp, Glycine max
  Clone ID: LIB3167-029-P1-K1-A5
ggacaccgtttagaccgatggagaatggttagcgcgcacagaacctacactgccgaggagaagcacgtggaggatcaaatagagcagccactgaatacactcccgaaagatctctaatgtgcaggcctataacaacgaatgtaaactagacagagaggaaaagttcttggacagaccgcgtaacctgcaagccatggctatatattgcgaggctattgcaaaaatggaagaatatcaccgagacataactgagttacaagcctgactggatcatagatacgggcaatgtggaatcacaactagagttgtggtcctctcctcaggtttatcagactttagagcatcaaatg

SEQ ID NO: 50051 - DNA, 97 bp, Glycine max
  Clone ID: LIB3167-029-P1-K1-A6
ctcttccctcgcgaatatcaactgaggaagccaaatttgtaatgagacaatgtattgcagaaatttactgacccaaataaagggaaaatttgtattc

SEQ ID NO: 50052 - DNA, 305 bp, Glycine max
  Clone ID: LIB3167-029-P1-K1-A7
cccacgcgtccgcagcctccaaatccaatggcttcagagaagaaactttcgaacccaatgagggagataaaagtgcagaagctcgtcctcaatatctctgttggcgagagtggagatcgtctcaccagagccgccaaggtgttggaacaacttagtggccaaaccccagtgttttccaaagcacggtacactgttcgttcctttgggattagaagaaatgagaagattgcatgctatgtcactgtcagaggtgacaaggcaatgcaacttttggagagttgtttgaaggtgaaggaatattaact

SEQ ID NO: 50053 - DNA, 262 bp, Glycine max
  unsure at all n locations
  Clone ID: LIB3167-029-P1-K1-A8
acccacgcgtncatccactcgttcgcctaatactcatgtttttgctggagaaccacccaattcacctgaacccttctcactacatcatttagattattagagaaggcacaaaaaatggcactgctttctttaagttccatggacatgaacaattttagatgaccgttttggatcctgagtataatatgttgttcaatgagggcatggtgttcactgctaggggtgggttcaaggctttgatcactggcttacaaaaatggtt

SEQ ID NO: 50054 - DNA, 356 bp, Glycine max
  Clone ID: LIB3167-029-P1-K1-A9
cgatgaccatattttcctaccgagtcaactccatgacgatgactcagtgagttgcactgctaccgacccaaaccttaactacaagccggtgatcggaatcctgacccaccccggcgacggtgcctctggccggctcagcaacgccaccggggtttcttacatcgccgcctcctacgttaaattcgtggagtccggtggtgctagagttattccccttatctacaatgagtcacctgagaaccttaataagaagctcgatttggtcaatggagtgctcttcactggtgggtgggctgtttctggtccatatttggatactcttggaaacatttttaagaaagctttagagaaaaatg

SEQ ID NO: 50055 - DNA, 333 bp, Glycine max
  Clone ID: LIB3167-029-P1-K1-B1
attaccatatttttctacctagtcttctttatgacgatgactcaatgagttgcgctggtacctacccaaaccttaactacaatccggtgatcggaattctgacccaccccggcgacagtgccttttgccggctcatcaacgccaccggggttttttacaaatccgcctcctacactaaaatcgtggagtccggtggtgctagagttatttcccttatctacaatgagtcacctgagaaccttaataagaagctcgattttttcaatggagtgctcttttactggtgggtgggcctgtttttgttcatattttgatactctttggaacattttt

SEQ ID NO: 50056 - DNA, 348 bp, Glycine max
  Clone ID: LIB3167-029-P1-K1-B10
gcaaaaatggcatcattcaccatgacagcttctatctttggctgcccagctgtcaccaaacggtcggcagtggctgcgcacaggagattactcgtagtgagtgctgccaaagctgaaggggaaaaggtcagatatgacaacaatgatagcactggaaggaggaacttgacgttcgctgtggctgctgctgctgttttctctgttgctgggatcgcagaggcagatgagcctaaaccaggaaccttagaagccaagaaaaagtatgccccgggttgtgtcaccaatcctacagctaggatttgtcgcaatagaggatctcctgtctcattttacctctgaagatcggaa

SEQ ID NO: 50057 - DNA, 346 bp, Glycine max
  Clone ID: LIB3167-029-P1-K1-B11
cccacgcgtccggtgagctataagctagtttatcgtgaggagaatatgaagttgtttgttttctttgttgctgcagtagttttggtagcatggccatgccatggcgcaggctaccaaaggttccctctccgaatgaaaactggctatggtgagcgttcttcggaggtaaaatgcgcaagttttaggcttgctgtggaagcacacaacatccgagcctttaaaaccattcctgaagagtgcgttgaaccaacaaaggactacattaatggcgaacaatttagatcagactctaaaacagttaaccaacaagctttcttttatgctagtgaacgcgaagtccatcaca

SEQ ID NO: 50058 - DNA, 347 bp, Glycine max
  Clone ID: LIB3167-029-P1-K1-B12
cccacgcgtccgcaaggatatctgactctctgttgattgcttggactatgcgtgattcttagcattctcccaagcttgcagtggctttgctttggaaaagcaaaaaaaaaaaaaaaatattggatggaggaagcatgtgaatttcgaagttgggctgaattgattcctgatgcgctcggggtaatcttcaccaatctttctcttcaggagagggtaacagtgatccccagggtgtgcaaatcatgggctaatgcagtaactggaccttactgctggcaagagatagacatcaaggattggagcaaccgatgccagcccgaccaactcgatcggctacttgagatgct

SEQ ID NO: 50059 - DNA, 354 bp, Glycine max
  Clone ID: LIB3167-029-P1-K1-B2
gagagaatgggagggtgggctatcgcggtgcatggtggcgctggtgtcgagcctaatctcccactcgagcgccaagaagaagcgaaacaacttctcacgcgctgtctcaatcttggaatctctgctctaaattctaatcttcccgccatagatgtcgtcgaacttgtggtgagggaattggaaacggatccgctgttcaattcgggccgtggatctgccctgacagaaaaaggaacggtggagatggaggctagcatcatggatggtccaaaacgacgatgcggcgccgtttcgggtcttaccaccgttaagaacccgatctcgcttgctcgtttggttatggacaaatccccg

SEQ ID NO: 50060 - DNA, 349 bp, Glycine max
  Clone ID: LIB3167-029-P1-K1-B3
atggggtgttggtacatggttaaaggaaattaaagacactactaaagaaggatatagttttgaagagctatgcatcaagaaagaagccattgagggagaagagaagttttgtgcaaaatccttgggaacagtaattggttttgccatttcaaagctgggaaagaacattcaagtactttcaagttcctttgtcaataagcaagaccaatacactgtggaaggagtgcagaatcttggagacaaagcagtgatgtgtcataggctaaatttcagaactgcagtattttactgccatgaagtccgtgaaacaacagctttcatggttccattggtggctggtgatggaacc

SEQ ID NO: 50061 - DNA, 351 bp, Glycine max
  Clone ID: LIB3167-029-P1-K1-B4
cccacgcgtccgcccacgcgtccggaaaaggagaagcttgctcccttatcaatacaatgactagaaatctagaatggctttgaagcttgtaaatctagggtttcactcatcgattccgtgttctccgaggcccttgaaagatcggttcgtgcttcggtcttctaaagtggagcaaatatcgtttacggaatctgagaactcactcatcgaagcccttcttggcatccaaggacgcggacgttcttcttctcgtcagcagctcaatgctgttgagcgtgctgttcaagtcctggagcggttagggggtgtacctgatccgacaaaatcaaacttgatcgagggtcgctggca

SEQ ID NO: 50062 - DNA, 352 bp, Glycine max
  Clone ID: LIB3167-029-P1-K1-B5
gcgaaagctaaggaagaggcagaaaaaatcaaagatgtagccagagaaaaagctggtagcagaacaagaaaaggcatttacctcctctttattggcttactgacctttgcaatagttgattctgttgcctcatcatcaactgattggagaaaaatagcagttctgggagctattctagtggctttagtttctcagttcatctacgaacagacaatgtcaatagaaactggaaaaataagaaagatcgataccgaagaggaaaataactgaagtttaattgttactgagattcaatgcaagtttctgtggaagacaaaattataatggatgttgcgtgatgcaataatcccaa

SEQ ID NO: 50063 - DNA, 198 bp, Glycine max
  unsure at all n locations
  Clone ID: LIB3167-029-P1-K1-B6
gggcgagcacgcgnncagcacacggccgaaaggatatttttttttctgttgattgcttggactatgggtgggtcttaacatactcccaaactcccaatggctttgctttggaaaagcaaaaaaaaaaaaaaaatattggatggaggaagcactgtaaatttcaaaattggcctaaatggatccctattccccccgggg

SEQ ID NO: 50064 - DNA, 356 bp, Glycine max
  Clone ID: LIB3167-029-P1-K1-B7
cccacgcgtccgctagaccatggcattctcgtgagagagacaaaaggggaaaaaattaaggccctctcttctcttaccctacgcacttcccctctcttatcctgcgcactctattattcccattgattccacttcccagtagttagtatcccaaatttccgaggggacccccatccccggcaattcaaccttttttttttcttcagttaaaccgtaaccaacaacaacgttttcatgataaaacgttaaatgtacgctgagacaacttccgcgagtttctctcacccgttacaccaaatggtgtttcccctctccatattcttcttgctgtgtcctgatcttgttggattcgggcc

SEQ ID NO: 50065 - DNA, 344 bp, Glycine max
  Clone ID: LIB3167-029-P1-K1-B8
gccttgaaaaaaaaaaatcaaatatttgtttcaatagctacctgtataattccatgtaacattttgtaacgaatcgggttgctacgttggtatctctgtgttgtaattaaacttcgaattcaaactcaaaaaaaaaaaaaaaaaaaaaaaaaaaaaaaaaaaaaaaataaaaaaaaagaaaaaagaaaaaaaaaacaaaaataaaaaaaaaaacaaagatataaccataacaaaaaaaagaaaaagagaaaaaaaaaggggggggcccttttaggggatcaaagtttacttccggggccttgcgaggtttaatcttttttatggggccccccaaattaatttcc

SEQ ID NO: 50066 - DNA, 357 bp, Glycine max
  Clone ID: LIB3167-029-P1-K1-B9
gtattcttgtcaggaagatatcttgacaaaatggccgtaacagaagcaaacctaaagaaggctggcttccacacatgggagcagttaattctcaaggatccacatcttatcactccaaatgcactttcatacaaatcagcaatgagagagaatctgttgaggcagggatacagaattgttggaatcattggagaccaatggagcgatctgcttggagaccacagaggcgaaagcaggacctttaagcttcctaatcccatgtactacattgagtagtaccttcacctctctcaacaatctagctagagtttgctcctatctatatgtaataaggtatgctgatatgcactattcaaa

SEQ ID NO: 50067 - DNA, 353 bp, Glycine max
  Clone ID: LIB3167-029-P1-K1-C1
cagaaagagaagcattagcaaaagcaagaagaactagtctaagcagaaatggcctcttcagtgatggcatctgtggccctcaaacctgcccctttcactgttgagaagtcctcagttagaggccttccctccctctcaaggaactcctcttcattcagagttgtggccagtggtggcaagaagatcaagactgacaagccttatggaattaatggtggcatggctttgagggaaggagttgatgcatctggcaggaaaggaaagggaaagggcgtttaccagtttgtagacaaatacggtgctaatgtcgatggttacagtcctatctacgacaccaaagactggtctccaac

SEQ ID NO: 50068 - DNA, 348 bp, Glycine max
  Clone ID: LIB3167-029-P1-K1-C10
gtttgttgtgagctataagctagtttatcgtgaggagaatatgaagttgtttgttttctttgttgctgcagtagttttggtagcatggccatgccatggcgcaggctaccaaaggttccctctccgaatgaaaactggctatggtgagcgttcttcggaggtaaaatgcgcaagttttaggcttgctgtggaagcacacaacatccgagcctttaaaaccattcctgaagagtgcgttgaaccaacaaaggactacattaatggcgaacaatttagatcagactctaaaacagttaaccaacaagctttcttttatgctagtgaacgcgaagtccatcacaacgacat

SEQ ID NO: 50069 - DNA, 343 bp, Glycine max
  Clone ID: LIB3167-029-P1-K1-C11
ctctaaacctctgcactccattcttctctcgcatgcttcaccaccctggtgctggttcttcttctctccccaacactcacactcctttgccttctctattatttttctccccttcctcactcctcaaccctaaccaatccaccttcataagcaccaaagcttccgtgagcgagagccacaatgatacctccgacgacaccgttgtctacttatttgaccaacaactcatccttcgactcgcctgagccgtctaagactccgacaaggccatactagtgatcgccgacaactaatttcgaaacgactgcatgtattttttctcccatggcagattctttatttt

SEQ ID NO: 50070 - DNA, 349 bp, Glycine max
  Clone ID: LIB3167-029-P1-K1-C12
agataagggaaagctcattgctaagtcagcatcaatgcctaatctgacagaactagtagatggaggcttagcatttgctcactattgtcttactgggaatgaatttctgagattatgtacaggagcaatacctgggacacgtgactatgataagcagcactgtaaagaccttcatctcttgcctgcactggtagaaaatcctatctatggctggtgaatgggttgactagtttggatgtttgaaggaaaacttgtcacaccagattatgacaagcagtactgtaaaagccatcatttaaatgcatgtaggtagaaaaatttacggatggctggtgaatagatttagtgg

SEQ ID NO: 50071 - DNA, 353 bp, Glycine max
  Clone ID: LIB3167-029-P1-K1-C2
agcaaatgcagtgagcagaaaatgcagatagaggcactgcccccggctctccaacgcccgtttcagcctccactttctcttggattccctttcaaaccttcttttttaactccagccacacacgccccttcgcacttcaatacatattcacgttttcagcattcagttaagtttcgtcgctcttttgcaacggttacagcgaccaccgagaaggttgttattgacgacagcgacaccaccaacgacgaaccgggcttcgttaacattggctacatatcgagtgttcatggaattcagggcgagattcgcgtcaagccagccaccgattttcctcaactgcgcttttccactcc

SEQ ID NO: 50072 - DNA, 350 bp, Glycine max
  Clone ID: LIB3167-029-P1-K1-C3
cccacgcgtccgcccacgcgttcgtggtttcagtgagtgatcggtgttcacttgatccttcataagtcgtcatcatcatcatcatcatcaccgttgattgaagaagatgccgatcagaaacatcgccatcggaaggcctgaagaggctactcaccccgacacgttgaaggcggggttggctgagttcatctccaccttgatcttcgtgttcgccggttcaggttccggcatcgcctacaacaagctcaccgacaacggcgccgccactcccgccggcctcatctccgcttgcatcgcccatgctttcgccctcttcgtcgccgtctccgtcggcgccaacatctccggcg

SEQ ID NO: 50073 - DNA, 350 bp, Glycine max
  Clone ID: LIB3167-029-P1-K1-C5
cccacgcgtccggacgaagagcaccatgcccacctattgggaaaactgttggagacatttcaagtggttgtgaacttaatacctttcaactctattggtaccttgagtcaattcaaacctaccagtgagcagaaagtctcaaattttcagaaaattcttaggggtacctataatattcgaacaacagttcggaagcagatgggtcaggacataagtggtgcttgtggacaattgctggtgaacatatctgacaagtcccttggcactgcagttcccctaacggacatagaagatattgttatctgatatcaatagcttcaatttaattcttgccctcaattttaatttcg

SEQ ID NO: 50074 - DNA, 350 bp, Glycine max
  Clone ID: LIB3167-029-P1-K1-C6
ttgaaattttaaaaatgactgggataaacttaagaattcaattattgaaattgaataagtaaacaatttaattggattggtcgaatggtatcaaaaaaatggagtactaactcccatttcttatttattattgaattaaccgatcaacttgctttgttatcgaacatttctttttgatttcaaaaattttccggaaaaaatttgaatctatttttatatgcgaatcaatcctactacttctggtcctgaggtttctgcgcttgaaaaaaaaaaatctgggacgtatcgcccaaataattggtccggtactagatgtagcttttcccccaggtaagatgcctaatatttac

SEQ ID NO: 50075 - DNA, 354 bp, Glycine max
  Clone ID: LIB3167-029-P1-K1-C7
agctttgttagttgaaaatggaaaattcctcctttctgctaagaggacaaggagaacaacttacacagagtacgttatttccatggatgctgacaacatctctagatccagtaacacttacattggaaagctgagatcaaattttcttggtacaagattcattatatgcgatacacagcctccatactcttctgcccatatatgccctcctatgactgggaagacgagccgtagattttattccaaaaaggtctcgcctaaggtcccatctgggagttacaacatagctcaggtaacatatgaattaaatgtgcttggaactcgaggcccaagaaagatgcactgcgttatgca

SEQ ID NO: 50076 - DNA, 346 bp, Glycine max
  Clone ID: LIB3167-029-P1-K1-C8
tttcaaaataaattgagggggcttcatataattaaacatttgtttgcaagtttttacaatttaggtgttgtaaatgcaattttaaaccttgattacaaatgaaacagcactagaaatatgccgtgtgagtaccatggagtttttatcttcttaacaattgcttttgtatatcttatttatgatctgttcaataatttaattttctggacataactttggttaattttgaatcctagatattaagcaggcaaccccatctggatgatgagatctacaacaagcttgttcagagagctaaagatgtaggatatgatgtgagcaaactccacaagaccccacagagcga

SEQ ID NO: 50077 - DNA, 343 bp, Glycine max
  Clone ID: LIB3167-029-P1-K1-C9
attcaagattcagcaagtgcgttttggaagcagagaccgaaatacttcgagatggcccgtacaaagcaaactgctcgtaagtcaactggaggaaaagctcccaggaagcagcttgcaaccaaggctgcacgtaagtctgcaccaacaactggtggtgtgaagaagcctcatcgttatcgccctggaactgttgctcttcgtgagattaggaaataccagaagagcactgagctcctaatcaggaagctttctttccagaggttggttcgtgaaattgcccaggatttcaagactgatctgcgtttccagagccatgctgtgcttgcattgcaagaggctgctt

SEQ ID NO: 50078 - DNA, 351 bp, Glycine max
  Clone ID: LIB3167-029-P1-K1-D1
ctttgtcgcaaagagaagagatctgcctccttttttttatcaaatctatctcttcttcaagaatagttgaaaatggggctgtctttcaccaagttgttcagccgactgtttgccaagaaagagatgcgtatactgatggtgggtctcgatgctgcgggtaagaccaccattctgtacaagctcaagcttggagagattgtcaccaccattcccaccattgggtttaatgtggaaactgtggaatataagaacatcagcttcactgtctgggatgttggaagtcaggacaagatccgtcctttgtggagacattacttccaaaatacacaaggacttatttttgtggttgat

SEQ ID NO: 50079 - DNA, 346 bp, Glycine max
  Clone ID: LIB3167-029-P1-K1-D10
gacggatgctcgacaagttggtgtgtggttcactgacaccactcccgggcgtgggactgctccggcacctgcggctccccctggagcgagcaactatcctcctacatccgctcgagcccgctcgcgcgccgacttgacttcgccgaagcagacccgatgctcgaggggaatgtcgcaacgcgcgtcgcagcaataagaggaggaaagggcgcaaggggggaggtgacgatcgcaaacaagagcgacggggagctgaccgcagcggacctcaaagggaagaaggtcttaggaaggaacgacctaaacgtaccgatcgacgacaaccagaacatgaccgacgacacca

SEQ ID NO: 50080 - DNA, 348 bp, Glycine max
  Clone ID: LIB3167-029-P1-K1-D11
cccacgcgtccgcccacgcgtccgtacagatcagaagatttcagcaataaaagacattataccactgttggagaaaaccactcagttgagagctcctttgcttatcattgccgaggatgtcactggtgaggctttggccacccttgtcgtgaataagctgcgtggtatccttaacgttgctgccattaaagctcctggctttggtgagcggcgaaaggccctgcttcaagacattgctatattgactggtgctgagttccaagctagtgatctgggtctgcttgttgaaaacacctcagtggagcagcttggtttggctaggaaaattaccatctccaaggattctac

SEQ ID NO: 50081 - DNA, 326 bp, Glycine max
  Clone ID: LIB3167-029-P1-K1-D12
cccacacgtgcggccacactctgttttgtgtacctacaaaaagaaaaaaatcatctaagttctaacggtgaatcaccaacaacaatctactgtgactgcatatccagcaggggctcagagcaacctagcagtattcaccaccacctgtaggttatcccactaaggatgatctttctttccaacaaaatgttcctgtcaaaaccactaccaggggtggtggcttctggagcggatgctgtacggcactccgctatggctgctagtgcatacactgtctgcaatgatgttactcctcttgaacatacgttgactttatggatttgagc

SEQ ID NO: 50082 - DNA, 353 bp, Glycine max
  Clone ID: LIB3167-029-P1-K1-D3
gttcgactgttatacggggaagataagcctacaattcccccgtttgtgattcggggaccaccttcctccctaccaaaggacccgaggtgtagtgtcaaaaagaaaaagaagagaagatcacacaagttcagtcggagtcttccagattttgctggaaacagcatggatttgcacagaagccaccatgttgataacggtgcttcaagctcactcccattgagcccatcattgcctctactttctcatacaggagctctaggaactcagcatattgaatctgaccttaacttgcctcctctaaatttgaaagtggcaagctcgtcacactcttcaaaaaaagcaagttcaggact

SEQ ID NO: 50083 - DNA, 351 bp, Glycine max
  Clone ID: LIB3167-029-P1-K1-D4
tattaattcacttgcccggaaagccctggtcaatgcagatggtattatagagaaaacattcttgtggggtaggtactctatggaaatgtccgctgtcatttacaaggactgggttttcactgatcaagcattacctaatgatcttgtaaagagaggagttgctgttaaggacccatctgctccccatggagttcgtcttttgattgaggactatccttatgcttctgatgggctagagatatgggatgccatcaagtcctgggtgcaagaatatgtctcattctactacaagtcagatgaggaactccaaaaagaccctgaactccaagcttggtggaaagaacttgtaga

SEQ ID NO: 50084 - DNA, 341 bp, Glycine max
  Clone ID: LIB3167-029-P1-K1-D5
aaccatgacagctaatatacaaaattgagacgcggctgaacaaaaatgagagtgttgagggtcccttctgatgcacgagagtgggtcctccccactaactttgaagaggctaaggttcaccaactactgttacaccgacatggacgctaaaactgctaacgcacaacttgctcttgtgaaagaaagatattgacgagagatccatgtttttgaaacatcacctctttatcaatcttcaaaggctgggtgctccacactaacgacaagagaccgatgacttctatgactacactgctgaacattatcacagacttttcgctactcaaaacgaagataaattc

SEQ ID NO: 50085 - DNA, 353 bp, Glycine max
  Clone ID: LIB3167-029-P1-K1-D6
cccacgcgttcgcccacgcgtccgcttcgtcttcttcgctgtggtatgagctcaactacattgagtccaaggggaggatgaagaagggtgatagggtgtggcagatagcgtttgggagtggctttaaatgtaacagtgctgtgtggaagtgcaacagaagcattaagacaccggttgatgggccttgggctgattgcattgatcgttacccggtcgatattcctgagatcgttaagctctaggatggagaattgttcaagaacaagaagataattgcttattttatgaaaaaaaaaaaatagatgagttctcataacccttctctatctgctcaccgtagccgtaccacaaat

SEQ ID NO: 50086 - DNA, 176 bp, Glycine max
  Clone ID: LIB3167-029-P1-K1-D7
gaagaccaaacgcgcaaaatggaaccgcttgagcaccttgctgactgcccactgaagcatgcatctataaatgcatgtctacaccccactgaaatcaacaaaatcatcattgtctatatttcacacaacataaagcctctagttgacgatggcctaatcatattgctaaccaccat

SEQ ID NO: 50087 - DNA, 347 bp, Glycine max
  Clone ID: LIB3167-029-P1-K1-D8
atcgatacatagaacacactcgcttttatctcatacggcaatggcgctcacgttgggcactggtctaattgcggtgctcccttcgcgctggatgtatcttttaccttacacgtctagcattgacacactctttttaactgcacgggagcgctttggactgaaactttatgggggaatggtaattaaaggcattaaggtgagggctcagctatgagttggcactgatggcactgtagctaactctggtgaacaggcccaacgccttgctattaaagaaagccagaggccagaataccccttgtatggcatagttggacaagaggagatgaagctttgcactgtcctta

SEQ ID NO: 50088 - DNA, 354 bp, Glycine max
  Clone ID: LIB3167-029-P1-K1-D9
caaattcattgcagggactttgaaagaagtgttttcccactgtcaaacttttagttgtctgaggctttcaactgcaagccttgaggaggagtgccccatcattgatgatgttgatgaggtgattgtttcagaggttagaagccaagttatggagaaacaaaagcacaagccaagcccattgagagaaggtttttccttggcatactctcctgcaacaagggaactgtatgtcactcacagtcacacaatggcaccacaagcaagggtggtagtaggtgatgaagaacacgacgaaagagaagagtttttttcggttaaaagttgtctctcgtgctgttcttcgagtgctgtgag

SEQ ID NO: 50089 - DNA, 352 bp, Glycine max
  Clone ID: LIB3167-029-P1-K1-E1
caaatatggttcatcatatagccgcacaacatggaaacctgcttaagagtcacctcaaatcaaaatgctacaaagatgaaccctaccctgctctttccttttcaagtaagggtgaacgagatggacactggcaatctttttctactgggttatctcccacaacctctaaggcagcaagcgatccatggctgtcattcttatgtggtccatctgctgttgatgaatgtgaaaatgtgcagccagattcttcaagtgaagtaagcattgaagaaatacactcaaatgataatgtgttagaaagagatgttcaaccgtctttatctgacaaagaccaaatagagaaagcacagca

SEQ ID NO: 50090 - DNA, 349 bp, Glycine max
  Clone ID: LIB3167-029-P1-K1-E10
gatatctgcagtctcgatattttttgagacaatgccatatcgattgaatgaaagtacaggatacatcgactatgaccagatggagaaatctgctacactcttcaggccaaaattaattgttgctggagctagcgcttatgcacgtctctatgattatgaacgtgtacgcaaggtttgcgataaacagaaagctatactattggcagatatggcacacatcagtggattggttgcagctggtgtcatcccatcaccttttgattatgctgatgtagttactaccacaactcacaagtcacttcgaggaccacgtggagctatgatattctacagaaaaggggttaaagaa

SEQ ID NO: 50091 - DNA, 350 bp, Glycine max
  Clone ID: LIB3167-029-P1-K1-E11
aaaaaaggttttagatcgtaaaaactaatcactacgaaaacaagagatatcgaagatggctctgcccaaagctaaggagatcgtgtcgtccaattccgtcgtcgttttcagcaaaacctattgccctttctgcgtcgatgtgaagaagctcttcggtgacctcggtgccaattacaaggccatcgaactcgacactgaatccgatggaaaagagctccaagcagcattagttgagtggacggaccagcgaaccgtgcctaatgtgtttattggtggaaaccacattggtggctgtgactcaacaactgccctgcacactcaggggaagctggttcctctgctgatatctg

SEQ ID NO: 50092 - DNA, 352 bp, Glycine max
  Clone ID: LIB3167-029-P1-K1-E2
cccacgcgtccgggcgctcactgcttcgctcgctaacaacgcatttctgaaaatcccaacactccatcatggcgaatgctcactgtcttcgtcatccttcatcggttctcggctcacactctcgcgctcttctactcttcaagggaaccaattgctttcgagaaagcaattcgtggttttcgcgaggaagatttcggggttggaggaggccatgaatatcagaagagaacgtgaagttcgagttgcgccaaagtttaagaaaaggcctccattaaggcgtgggagagtatcaccacatctccctgttcctgaccacataccaaggcctccttatgtaggttcagatatactt

SEQ ID NO: 50093 - DNA, 352 bp, Glycine max
  Clone ID: LIB3167-029-P1-K1-E4
cccacgcgtccgtccacttccaacgccatgcctctttttggaattttccagataccctcatttatggacataatcactgacctcgccatcttcattactccgctatggatttcggttatcgtcggcgtcgtcgtgggctgggcgtggaagcccaaatgggcctttcaccccaaagacgctcttctcaagtttcgctcccctcgccctcccaatccccaaaacgacaccgcttttacctactccgccaccagttcctccgcgcgtgagaaagacgcgagtgggagtcctgtggtgacggaagacgatttgctgcatctgtggaagttggttgaggaaaaagacggagggcggg

SEQ ID NO: 50094 - DNA, 350 bp, Glycine max
  Clone ID: LIB3167-029-P1-K1-E5
acaagaccgccgctcatgcttcttattaggcgcgggcatgaaaggacctgagtgcacaggtctctagcgttatgctacacttctcatcatgccagaggaggctgcttaacagattgttgcacgcgaaccccacctatctctatgtagctgagctacagacgccaactgtattcttaaagtgctcgggaccacctaagactggaccggagtacacagagccgtgcagatcgtaccttgggaactattgatctacttctatgagaaagaaagatgcgcctgttgattgacccgtaatgtcctataagcccctggcagcactgagagctttatctggctctgcatggctgctt

SEQ ID NO: 50095 - DNA, 271 bp, Glycine max
  unsure at all n locations
  Clone ID: LIB3167-029-P1-K1-E6
gtcttttatcacacaatgttgggagcgctcattgaagcggtgagatagacttcgggagtggtgattctgggcttcaatctctatcctgtcattgtttttttctcaggaaatgaatacaagtcgtgactgcttcattttcacggatgcgttggagacttcaagcaatcaactctttaaaatagctttacatgactgttcattatgaatttgctatcaggatttatatttaatgaacctgaattttttttgtntttaaaaaaaaaaaaaaata

SEQ ID NO: 50096 - DNA, 354 bp, Glycine max
  Clone ID: LIB3167-029-P1-K1-E7
cccacgcgtccgcccacgcgtccgaatctctctctctctctgtctctctctctctagacttagattttgtgaatggctgaagtggaagagggacaggtcatcggcgtccacaccgttgatgagtggaagctgcaactccagaatgcaaaagactccaaaaaactgattgtggtggattttactgcttcctggtgtggtccatgccgttttatggccccagttcttgcagagattgcaaagaaaactcctgaattgatcttcctcaaagtggatgtggatgaagtgaggcctgttgctgaggaatattccattgaggccatgccaaccttcctcttcttgaaagatggcgagatc

SEQ ID NO: 50097 - DNA, 356 bp, Glycine max
  Clone ID: LIB3167-029-P1-K1-E8
ggccaaaaaaacagaacatagtgacagagtgttccagagagtttgttaaagaactgtgaagaagagggtaactgcaaacaaagcaagcaaaacaaaagacgcagtgatggagaggatgaagagggtgcttctgctgcttctggccttcactgttcttctcatgttgccagaagcttctgctacaaagtttactgttggaaacaaccagttttggaaccccaatattaactacactgagtgggctaaaggcaaacatttctaccttggtgactggctctattttgtgtacgataggaaccaagcgagcgtgttggaagtgaacaagacagattatgaaacatgtaactctgatcatt

SEQ ID NO: 50098 - DNA, 351 bp, Glycine max
  Clone ID: LIB3167-029-P1-K1-E9
caaccttgtaagtttgtaacaatgacttcctcggttacttcctcttttcgcatcagcaatttgaattctgtttttgttggtgagacaaataaattcagagtttcaactgttcctggtgctcatgttggtttcattagaaagactgtagaatgtaaggaatcacgaattgggaagcaaccaattcctgtgccatccaatgtcacagtcaaattggaaggacaggatatacaagtgaaaggtcctttgggagaacttgcattaagttatcctcgagaagtgttggttgagagggaagagtcagggactctaagggttaaaaaggcgggtgaaaccagaagggtcaatcaaatg

SEQ ID NO: 50099 - DNA, 350 bp, Glycine max
  Clone ID: LIB3167-029-P1-K1-F1
attcaattttgcgtttctctgcctaaaaggattgaaagatgggtcaagcattcggttgctaccaagtcgatcagtcaaatgtggctatcaaggagcattttggaaaatttgatgatgtcctagagcctggatgtcactgcctgccttggtgtcttgggtaccagattgctggtagtctgtcgctgcgagtgcagcaacttgatgttcgatgtgagacgaaaaccaaggacaatgtctttgtcaatgtggttgcatctgtgcaataccgagctgtgtctgagaaagcatctgatgcattctataggcttaccaacactagggagcagatccaatcatatgtttttgatgtc

SEQ ID NO: 50100 - DNA, 348 bp, Glycine max
  unsure at all n locations
  Clone ID: LIB3167-029-P1-K1-F10
cccacgcgtncggggatgacatccttcccatattacccaatgagcatatgcttacaacctggtcagattcctaatcctcattcatggcaatcatttggaaactcaagttcatctgaagcaaaattaagtaaagttgataggagagaagcagcattgatgaagttcagacagaaaaggaaagagcgctgctttgataagaaaattaggtatgttaaccggaaacgacttgcggaaaggcggcctcgtgtgaggggtcagtttgtcagaaagttgaagggtgctaatgcggatcttaatgggcagcctgcatcgattgactatgacgaagatgacgaagaggatgaagat

SEQ ID NO: 50101 - DNA, 178 bp, Glycine max
  Clone ID: LIB3167-029-P1-K1-F11
ggcatgctaacataaagattacgaggctaagagaaagaatcacaggaaggtgcagggtgtaacaggagctgctaacacattatcaatgggacacccaatgctgactttttctcacacacaagactacggtctggactacaatgatccgcttccttcgccattagttcacccgccggag

SEQ ID NO: 50102 - DNA, 353 bp, Glycine max
  Clone ID: LIB3167-029-P1-K1-F12
cccacgcgtccggggttgagaaggtactggaagcagttcatatagctgccgataaaaataccgttccaggggatgtgtctgctatggttcctggaggcattcgaatgggaacccctgctctcacatctaggggatttgttgaggaagattttgaaaaagtagctgaatactttgatgcggctgtcaagttagccttgcagattaaggaaaataccaatggtacaaagttgaaagattttgtggcagctatgcaatcagatgaacaaattcaatctaagattgctaatctctgtcatgaagttgaggattatgctaagaagtttcccactattggttttaacatagaaacaatg

SEQ ID NO: 50103 - DNA, 349 bp, Glycine max
  Clone ID: LIB3167-029-P1-K1-F2
gaaatcctttgccatcttggatttcaattgagtggctgatttgattttcatcaaagattgacagctaaaggggaaatagttttgggtgttgaactgaacatccttgagaagctttgtttggtcttttaaataccaaaaccaccttgttgtgaattaatatttttgagaggaaaacagacattgtaaagcagcttaataaatgttaacattagaaaaacgagtggcccattttcctcctcaatttctgctttgatgtcatgttgtggtgtttaataagccactggcatattatacaattgtttttgaggataaggataaaatgttaagtgccatagcacgtgtaagttat

SEQ ID NO: 50104 - DNA, 350 bp, Glycine max
  Clone ID: LIB3167-029-P1-K1-F3
aattaatgaacatatttggaattgtttaccgatacaagaagatgaaagaaatgagtgcggcagaaagggaagcaaattttgttcctagagtttgtatatttgggggaaaagcatttgctacatatgtgcaagccaagagaattgtgaaatttattacagatgttggggctacagtaaatcatgaccctgaaataggagatctacttaaggttgtttttgtccctgattataatgtcagtgttgccgagatgcttattccagcaagtgaattgtcacaacatatcagtactgctggaatggaggcaagtggaactagcaatatgaaatttgcaatgaatggctgcatattg

SEQ ID NO: 50105 - DNA, 125 bp, Glycine max
  Clone ID: LIB3167-029-P1-K1-F4
cctaggcttccggggagtatgatcatctgaatatcggatagcatcgtgattgagtggagggaacgggaaggatatagtggtgcatattgctgcgcatggggaaaacatgccctcgatatcttctg

SEQ ID NO: 50106 - DNA, 355 bp, Glycine max
  Clone ID: LIB3167-029-P1-K1-F5
cccacgcgtccggcttcttccgccactcagcacttcgctccctctgtgcttcaccaaccatggccgaaatcgaagctaccgttccagatccctctcaaatcgacgtcaaacttttcaaccgctggagcttcgacgacgttgaggttactgatatgtctctggctgattacattggagtgtccccgtcaaagcatgctacatatgttcctcacactgctggtaggtactcagtgaagaggttcaggaaggcgcagtgccccattgttgagagactcaccaactctctcatgatgcacggaaggaacaatggaaagaagctcatggctgtcaggattatcaagcatgcaatggaaat

SEQ ID NO: 50107 - DNA, 354 bp, Glycine max
  Clone ID: LIB3167-029-P1-K1-F6
tcttctctttctctatcgtaactctcttctctgctctcagatcttccaaaaccctccgttccttcattactaaaatcacttctcttcaaagattctttttctctttctttctcagcctccacttcttttttctttcccgcgccctccaaccgcttcttgctccgtttttcccttcccgcatttcatctcacttgcattttccgctccgtacggaattgttgtccactctgcaattattttccgggaaaaacagagcattctcccgatgacagtaacatttttgtgaggaagtgaagaaaaatggacgatagaggcggttccttcgtcgccgtgagaagaatttcgcagggtctt

SEQ ID NO: 50108 - DNA, 354 bp, Glycine max
  Clone ID: LIB3167-029-P1-K1-F7
gcgcttacactaatgctacgtttaaggattacgccaaacagggcgtatcctttgctagttacaacgtatctttctctcctgggagagcatccaaaactgttagtggcagtttggtaaaaaggtgggttgaaccgggtaagttctttcgggagagcatgcttaaggatgggactcttatgcccatgcccgatataagagataaaatgcccaaaaggtcgattttgccccgctccattctgaccaaattgcccttctcgtcttccaaggttcacgagttgaagcgcctcttcaaggtttctgataactcctccatggagaagatgataatggactctttgggggagtgcgagaggg

SEQ ID NO: 50109 - DNA, 355 bp, Glycine max
  Clone ID: LIB3167-029-P1-K1-F8
cccacgcgtccgcccacgcgtccgttttcacaccaccaacacaagatgtttctggacattgtgttcctccttttccttctctcatccacttcccatgccactgtccaagacttctgtgtggcagacctcaaaggtgcagacacccctgcaggctacccctgcaagccacctgctaatgtcacttcagatgactttgtgtacactggcttagctgaagctgcaaatgtcacaaacataatcaatgctgctgtgaccccagcttttgttgctcaattcccaggtctcaatggccttgaactatctgcagcaaggttggaccttggtcctagtggtgttatcccactccacactcatt

SEQ ID NO: 50110 - DNA, 353 bp, Glycine max
  Clone ID: LIB3167-029-P1-K1-F9
cccacgcgtccgacccgatttaagaagaaccgcaagaagcgcggccacgtcagcgccggccacggccgtattggaaagcaccgcaagcaccccggcggccggggaaatgccggcggcatgcaccaccacaggatcctcttcgacaagtaccacccggggttcttcgggaaggtagggatgaggtactttcataagctccgcaacaaattctactcccccatcgtcaacatcgacaagctatggtctctgataccccaagacgcgaaggacaaagccctaaaatcgaaggacactgcccctctaatcgacgtcactcagcacgggtacttcaaggttctcggaaaaggtgtgct

SEQ ID NO: 50111 - DNA, 293 bp, Glycine max
  Clone ID: LIB3167-029-P1-K1-G1
cccacgcgtccgcccacgcgttcgtccacgcgtccgcccacgcgtccggcacagaccatcatcgatggccacaagcatctcagtatctttcaccgaagaggtctcaatctcgagagtttcttcaactatctttttagtcaccataataacccacctctctcgccctctattggggggcaccaagatatgtcttcacctttgtctcattacttcatttatactggtcataattcctatctaactgggaaccagcttagcagtgactgcagtgacatccccatcatcaattcact

SEQ ID NO: 50112 - DNA, 352 bp, Glycine max
  Clone ID: LIB3167-029-P1-K1-G11
cccacgcgtccgagaaactcttaggcattccacattctcaaccccgaaccctaagagcagagcgaaaatgacaaccaccttcgcgaccgtcgcaggactcggtggcgcattactgtcatccacctcatctcgtctcacctcagggtttgtgaaatccccagtgattgctaggaatcccttgaggcaagctgtggcaatgggaaatgggaggattacatgctttgagaggaattggctgcgggcagattacagtgtgattgggtttgggttgattggttggctagcaccctcaagcataccggctatcaacggtaaaagtctgactggcctcttctttgagagcattggtgct

SEQ ID NO: 50113 - DNA, 351 bp, Glycine max
  Clone ID: LIB3167-029-P1-K1-G2
gaagcttcaacattcaagacattacagctccctctccttctggaatccattgagcgtacaaacgtgaagaggccgaagccgcgatccaggaacgagaatgaagaagaagaaggcgtagaagaggtgttagtgatagatgttgagtacgatagcactgatggtgtgaggtttgatgtgttcatcaacgaccaaggcgataatgagattggaccccaggattcagagtttgcgggaagctttgtgactttgcctcactcgccgcatgtcaaccataacaacatcaccagagcttctttcaaattgccattaacgtatcagttgaaagacttgggagtaacaaaagacgatgat

SEQ ID NO: 50114 - DNA, 347 bp, Glycine max
  Clone ID: LIB3167-029-P1-K1-G3
cttcaagccaccaccaatggccaacaacgagatgcaagttgagaggggtttggacttggaaaggtacatggggcgttggtatgagatagcctctttcccttcaaggaaccagcccaaggatggcgtgaacaccagagccacatacactcttaggaatgatggcactgtgcaagtgctcaacgagacttggagtaatggcaagagagggcacatagagggaactgcttttaagtctaaccgcacaagtgatgaggccaagttcaaggtcaagttttatgtccctccctttttgcctatcattcctgtaacaggggactactgggttttgttcattgatggtgattacc

SEQ ID NO: 50115 - DNA, 356 bp, Glycine max
  Clone ID: LIB3167-029-P1-K1-G4
cccacgcgtccggatgtacttactcagcaatattgcgagtggaaatgagtctcatagagaagctatcatgcagctactcttttcaaaagcagaaaatgtgtctcactctttcttctaccagtttctgcagagcaatgacagttgtttacgcacatctgctgtttgggtcatagtaaatctaacttttcctgcaagtcctggggtatttggtagggttgtaaaactgcgtaatgtaggcattgtttctcaaatcaagaagatggtcaacgatccttgcatggatgttaagcttcgtgcaagacaagcacttgggcagattattacttttggtgataggtaattgtaatcagttactc

SEQ ID NO: 50116 - DNA, 357 bp, Glycine max
  Clone ID: LIB3167-029-P1-K1-G5
atctttctctcttctctctccccgcccaaaccctaactccctaccctattccggtttctctcatccatcatgaaaggaggaaagtccaagaccgaatctaagagagccgatgccaaacttgctgtgaataagaagggcgccgccaccaagactaggaaacccgccggaaaggggaaggcagcgaaagatcctaacaagccaaagaggcctccaagtgctttcttcgttttcatggaggaattcaggaaggtgttcaacaaggaacatcccgacaacaaagcagtgtctgctgtgggcaaagctgctggagcaaaatggaagacgatgtctgatgctgaaaaagcaccttatgtggca

SEQ ID NO: 50117 - DNA, 356 bp, Glycine max
  Clone ID: LIB3167-029-P1-K1-G6
cttttccttactacacccttcatcctctatcttcttctctcactccttcttctaaaggctctgttcatctttgtccatgctcttccacacgttctcgctctcttccccaattcccttccaaactacgacgcaaagccaccatcaagccgaggctgttgacgatcatcgaccccattttgctcttcaacggcgtcgccaccactttctatttcgacacgcaaacacttatcgtcactgtcagtgttttggccgccattgctctttctctcttccttggccttaagggtgatccggtgccttgtgagcgctgtggtggcaacggtggcacaaaatgtgtattttgcaacgatggcaag

SEQ ID NO: 50118 - DNA, 355 bp, Glycine max
  Clone ID: LIB3167-029-P1-K1-G8
cgccacctccaacacctgtttatcattacaattcaccgccgccaccgtcatttccaccacctacacctgtatatgaagggcctttgccacctgtcatcggagtctcatatgcatcttctcctccaccacccttttattgattcttttgagaacttttctcctctaacccttcccctctaccctagcaaagacgaaaaaacaaaaacacccattcaagttcagttcatacttttattattattggtggccatttcttctgtgccctcttcttcctgtgccagccaggtcatgtacgcgactctcgtcgcgaaaaataaaacctgagaaatcgagaagggtttgtgtaaggctgcat

SEQ ID NO: 50119 - DNA, 352 bp, Glycine max
  Clone ID: LIB3167-029-P1-K1-G9
ccacgcgttcgcccacgcgtccggttcttcatctgcatgcacacacttgcataggtttggaaaccaagaatttttgaagggtagcatcaacaagaagttctggaaatggagatcaccaatgtcagcgagtatgaagctattgcaaagcagaagttgccaaagatggtgtttgactactacgcatcttgtgcagaggaccagtggactctgcaagagaacagaaatgccttttccagaattttggttcggccaccgattcttattgatgtgtgcaagatagacattacaactactgtcctgggcttcaaaatattcatgccaatcatgcttggcccaacagccatgcagaaaa

SEQ ID NO: 50120 - DNA, 349 bp, Glycine max
  Clone ID: LIB3167-029-P1-K1-H1
ggtaaaacaaaagtttaagattttttttttcttttcttttcttagtttgcgatcttctaattttcaacgctctccactttctctattctttgatgggtcatctccaattacggtttttgtctttggtctttgcttcatttcctgttctgaattctaggttattatactctccaattgttgtattttcaagaaaaaaaatggcataatcatccaaagaaagaaagcatgctgctttggagaacttattcatgtttgtgttctttctttaaagtttgttaaatttaatgcagaacaagaatccatgttattttttatgcagagaacaagaatctatgtatttgaattcaaa

SEQ ID NO: 50121 - DNA, 338 bp, Glycine max
  Clone ID: LIB3167-029-P1-K1-H10
tcgcccacgcgttcgcccacgcgttcgttcacgcgttcgcccacgcgttcgcggacgcgtggggtatgttgtgagctataagctagtttatcgtgaggagaatatgaagatgtttgttttctttgttgctgcagtagttttggtagcatggccatgccatggcgcaagttaccaaaggttttatctacgaatgaaaactggctatggagagcgttttttggagggtaaatgcgcaagttttaggcttgttttggaagcacacaatatagctgtctttaaaacaattcctgaagagttgcattgtactaacaaatgacttcatttatggcgaacaattt

SEQ ID NO: 50122 - DNA, 353 bp, Glycine max
  Clone ID: LIB3167-029-P1-K1-H11
cgagtgcacatcatcaaaaggactaaaaaaactcaaagtacttcttttgcaaacactattccaagttccaaactctccacctctcataatggttttaaatttaatgtttattgcttcttctctgcattcaccatcaccttgcaccctcttcagttcccacaagctttgttggtcttcgttcaaaaccatttcaaagcaaagccacgcatttctccatagaaacccgtctctccagcgccacttgagtttgggttccaaaagggttcttccttcagtttgcttctttaacactgaagacaaatctgactccaaggaatcgggatggcctattctcaggcgatgggaggtgcctt

SEQ ID NO: 50123 - DNA, 351 bp, Glycine max
  Clone ID: LIB3167-029-P1-K1-H12
gaagaggtcgagtttcacagcagcaatggtgtacgtcaaggctcagaaatcaaaagcctacttcaagagatatcaagtcaagttcaagagaagaagagagggaaaaaccgattaccgtgccaggattcggttgattaatcaggacaagaacaaatataacactccgaaataccgatttgttgttcgctttagcaacaaggacattgttgcacaaataatatctgctagcattgctggcgatattgttcttgctgcagcatatgcacatgagctgccacgatatggtcttgaagtagggcttacaaattatgctgcagcttattgcactggtctcctgttggcccgaagagt

SEQ ID NO: 50124 - DNA, 66 bp, Glycine max
  unsure at all n locations
  Clone ID: LIB3167-029-P1-K1-H2
cccacgcgtncgcccacgcgnccgaaaccaannnaggggcnctnaaaacaaaggccccncaaacca

SEQ ID NO: 50125 - DNA, 121 bp, Glycine max
  Clone ID: LIB3167-029-P1-K1-H3
gtcgtgggatggtatcacaacaggaacgtgtccccgaacctctcactttgctacagcgtagagccaggatttttcagcaagaagttataaataaactgacgtgggtgtcatggcgctacaa

SEQ ID NO: 50126 - DNA, 350 bp, Glycine max
  Clone ID: LIB3167-029-P1-K1-H4
cccacgcgtccggggtctccgaggccactgcttcgctgaagagcatcattaaaacctacaaccttgatggcatcgatgtcagctacgaggacatcgccgccaacgaagccgactttgttaattccgttggggggcttgtgaggaacctgaagcagaacaagctcattactgtggcttccttcgcaacaagcgctgatgccgccaacaacaaattctacaatctcttgtacgcagaatatgctactttctttgacactgtggtgtttctgagctgggtagggtttactccttctcgcgccaacccagttgcgagcttggaggagaagatccttgccgtggccaacgagtat

SEQ ID NO: 50127 - DNA, 356 bp, Glycine max
  Clone ID: LIB3167-029-P1-K1-H5
tctctctcctcctcgatcccaattccactagggattcaattccgatgcgattccgagcttgttagatccacgacaacgtttcgtttcccagattcttttgtaaaaaaaaataatcttcctttgcccaacaggtaagttggaaaaaaatggaccatgacaagactgggtgccaagctcctcctgaaggtcctatattgtgcatcaacaactgtggattttttggaagtgcagctaccatgaatatgtgttctaaatgccacaaagacatgttgctgaaacaggagcaggccaagcttgcagcatcatccattgggaatattatgaatgggtcttcaagcagcactgaaaaggaacct

SEQ ID NO: 50128 - DNA, 182 bp, Glycine max
  Clone ID: LIB3167-029-P1-K1-H6
aagagcttttgttcaaactttctttgttctccattaaggctcacaaattaggggagttgtttcagagatatctccaccaatacaagagaccgttgtaggtaaacacagactaccgtggccacccctgatcgttagtttagacgggaacacatatagcactgctatctaccgatatgttattg

SEQ ID NO: 50129 - DNA, 343 bp, Glycine max
  unsure at all n locations
  Clone ID: LIB3167-029-P1-K1-H7
cccacgcgtccgcccacgcgtccgttgttcgccctctttctactttgtgccctgacctcttacctaccttcagccaccgctggtgatgtggtcgacactgatggtaatcctgttgaaaatggaggcacatactttgtgttgccaactataatattaaacggcggtggaatagaatatgccacatttggaaatgaaacttgccctgncactgatgcgcaatctcgcgatcagttctgcaagggctttccgataaccatttcatccccagcccgaatccgtcacatcagcgaaggccttaggttgaacattgggttcactttcgcatacccgagttcccccgctt

SEQ ID NO: 50130 - DNA, 354 bp, Glycine max
  Clone ID: LIB3167-029-P1-K1-H8
gtcttttggtggtatctcaacaagaactttttaaaccaaattttcgttttctaaaaaggggggcctgtaaattttatcaacacaattttatttaagtggggagggtgtctatatcttacaaatagagtcttggacctgctccatactccaagtgcaacggccagggcgacccgtgggtaggtgctgcttatggcattgcttggcatatccatgagcacaactcaagctatggcgacagattctgcctatcacttggatggaaagagttatggaccttggagtctaaagacctcacagtgcccttctgaatgcacaagaagatgtagccagacacagtaccacaagccgtgcatg

SEQ ID NO: 50131 - DNA, 351 bp, Glycine max
  Clone ID: LIB3167-029-P1-K1-H9
aaattttcctcccaaaatgtcaggccgtggaaaaggtgggaagggtttgggaaagggaggagctaacaggcacagaaaggttcttcttgacaacattcaaggaatcacgaaacctgcgattcgtaggttagcgagaagaggtggcgtgaagaggatcaggggtttgatttacgaggaaaccagaggagttctgaagatattcttggagaacgcgattcgcgatgctgtaacctacactgagcacgctaggaggaaaactgctactgctatggatgtcgtttattctctcaagagacagggaaggaccctctattgctttggaggctaaagaatagaatctttacgtttaat

SEQ ID NO: 50132 - DNA, 275 bp, Glycine max
  Clone ID: LIB3167-031-P1-K1-A1
cccacgcgtccgaatatggatccgggtatggtggaagaaaggaggagagtgaatatggatccgggtatggagggaggagtgagtatgaggagaaacctagctatgggaggagcaactatgagagccaaggaggaggaggaagggttgagtatggttatgaggggcgtccaccccggcaggaggaggaggaggggttccgcaagcccttctatgagaggaaggctgatgatgatgatgatgatggctatggtcattagaaaatatggagatgactt

SEQ ID NO: 50133 - DNA, 359 bp, Glycine max
  Clone ID: LIB3167-031-P1-K1-A10
aaactaccactggcccatacaaatgaatgactatagaatataaacaaaacacaatacaagaaatccgaggaaagttggaagtgaagaatggctacaatgtgaagatggtgatgcaattgacctctgagagttgtatttggattttctagttgaatcattggcagggtaattaccaagccctgcagcaacagcaggaggcacatctgcgtgtgagcgtggtcttgttgggatggcatcattatgatcctcaatgtcgtaacaatcaaatttcttccatcccaatacaagcttttctcggtcaaatacgacacggtaaccagtcatgaagttttgtccaattatgtttagttcagcacttt

SEQ ID NO: 50134 - DNA, 267 bp, Glycine max
  Clone ID: LIB3167-031-P1-K1-A11
cccacgcgtccgccactaaattgtttgaggcccaatattcctagattatgtcaagtggtaatctaagatgaagtgccacttcgaagagcttgggatttcttgcttgttgctaacttagtctcgggctccttcttcacaggttcttctttttcagataatatcaactctatgtggcacggagatgacatataaggattgattcttccatgggctcggtatgttcggcgtctttgcttctgtgcccacgcgtccggttctagatcgcga

SEQ ID NO: 50135 - DNA, 290 bp, Glycine max
  Clone ID: LIB3167-031-P1-K1-A12
gcacgcgtcaacaaagctgatgcttctcctgcttctatttcgcaggactttttttcactacacaattacttggtttaactcacttggacttagttatctgggttggcaacatactacccacccatattttggtcactttacttacttacaaactctctttagcatgttaacaccctgagagacaggtttcatggttgggaccctcataatgacttgttgccgaaaaggccaatacacctgacctcagtgagcacagatgtcatggggggaagggccgcctagagctttta

SEQ ID NO: 50136 - DNA, 435 bp, Glycine max
  unsure at all n locations
  Clone ID: LIB3167-031-P1-K1-A2
ttggaacgtcatgggcagcgaaccattgtatggcagcaacccaagttctggcacctcttaaagcannactcctttccttaggcccaacggcaagggtgcgcaatagccacatgcttcttagcggatagttgtttccatcgggaacctggganagtacaaccattgcggcaatgatnnttgtggtatggacccagacacgacgtgaaatacccttgggacccttttcacgctcaagaccccttcataccttgaaaaggagaattcccaggncggattatggatgggacannctgctggcttatcntgctgnacccggaaagcatttgccaaagaacagggcttcttgaggttatctcaatgggagatgggcccattgcttggaagcactaggatgcatcaaccccagaggtgcttagagaaagtggttgagagtgg

SEQ ID NO: 50137 - DNA, 429 bp, Glycine max
  Clone ID: LIB3167-031-P1-K1-A3
aaaaaaaaaaaaaaaaaaaaaaaaaaatttaaattaaaaaaaaaaaaaaaaaaaaaaagggaggggatataaaaaaaaaaaaaaaaaaaaaaaaaaaaaaaaaaaaaaaaaaaaaaaaaaaaaaaaaaaaaaaatggggcgccccttttaaaggttccaagtttccttccccttccttccaacttattaattttttttttgggccccctaaattaaattcactgcccgggtttttaaaacgtcgggattggaaaaaccctgcctttcccaaacttaatccctttgaaaaaaatccccttttcgccggttggtttaatacaaaaaagccccccaccattcccctttccaaacatttgcccactcttattggcaaatgggcccccccttttaccggcctctttaagcccggggggtgtggtggttcccccc

SEQ ID NO: 50138 - DNA, 427 bp, Glycine max
  Clone ID: LIB3167-031-P1-K1-A4
cccacgcgtccgcccacgcgtccgccaagcagagcagatattagaagatggcagacgctgaggatattcaaccccttgtttgcgacaatggaactggaatggtgaaggcaggatttgcaggagacgatgccccacgtgcagtgtttcctagcattgttggtcgtcctcgtcacactggtgtgatggttggtatgggccagaaagatgcatatgttggtgatgaggcacaatctaaacgtggtattctgactctcaagtatcccattgagcatggtattgttagcaactgggatgatatggaaaagatttggcatcataccttctataatgagcttcgtgtggccccagaagagcatccagttctgttgacagaagctccttttaaccctaaggctaaccgtgagaagatgacccaaattatgtttga

SEQ ID NO: 50139 - DNA, 421 bp, Glycine max
  Clone ID: LIB3167-031-P1-K1-A5
cccacgcgtccgattcaagaaactccttatttaatgacatcttgtctctcggatcattcttgagtaccttatcgttaataatagcacgcactcttttcattctttctctgttctcatttcatcttctacacgcgtttctagtcattattagactcgatctctacgatgaaggcaacactgctttgtccttgttcttctgctcctctgattctcgacacgcatagcaaccgaacctcggcaacgagacacgcttccaccgttgtttgttgttcgtcgaggaaccaaccctacatcccgaagctcgagccttttagccgaaccaaatttgaaagggccgttaaggaccctcctttgatcgaaaaatccgagagagagatcttagattattgttcaacgcttgaaggagaccaatcctatagct

SEQ ID NO: 50140 - DNA, 427 bp, Glycine max
  Clone ID: LIB3167-031-P1-K1-A6
gcaatacccattgctcctggccttgacctctctgcatctgcaacacctttctggcctagacaacaacccttcaggtgccaaaaatgaaaataaagatgtgaatcatcatgcttcaagaagctctgtggggctcaagataattattattttccttggtgtggtgacagtcatagcattctgtgtttttcttttcaaattatggcaaaggaagaagagagaagagcagcatgctcgccttttgaagctgtttgaagatgatgatgaacttgaggtagaacttggtatgcgggattgacaatttatctcattccttctttatagaaaaaatgcacatcattttcatgtcaacaaggctatgttcttttaccatttaaatctagcatgggttagtttgaagagttgaactcaggcatttgcttgtcacccg

SEQ ID NO: 50141 - DNA, 144 bp, Glycine max
  Clone ID: LIB3167-031-P1-K1-A8
cccacgcgtccgcccacgcgtccgttcaagcctttgattcagtcactaccgggcatgtatatctccaccttagagatattccaccatggacccttgctagctgattatgtttactacctttattgttgtgtttgtgtattacat

SEQ ID NO: 50142 - DNA, 424 bp, Glycine max
  Clone ID: LIB3167-031-P1-K1-A9
cccacgcgtccgctttttttccaactggctagtaaaatttcatccattcaggaggtgttaatcagccaattatgtgtggtggtgagccaagggctatgcttagaaaatatcgaggcaaagctgatgccccaatatattccattcagatatgcattcctaagcatgctttgaacttgatcttttcatttacaaatggagtagactgggatggtccatatagactacaatttcaagttcccaaggcattacagaacaagccaattgacttctttaataagggcttggcggaggaactgagtaaagaaggagcatgcgagcaagcaatatttccagacacaaataaagttataaccaaatgtgctatgattggtaatttgtcaaaagaagggggtgatcgctgcgatctgaattttgttgtaggatg

SEQ ID NO: 50143 - DNA, 495 bp, Glycine max
  unsure at all n locations
  Clone ID: LIB3167-031-P1-K1-B1
gtaccggtaacggnacagggccgacgccgacgccgatccggcccatggcttgannagcaattattgtggtttcactccttctttcaaatcacancannctcttagctcatgtgggtactaaactaaacaagtttcaaggtgaacccacgtcttcaaaatattgccaaagcaaccattcaaacctctagtncttatcaaccagactcgtggcaggtcttagagggcaagagcaaaaaaagaggatctttgtgtaaagtgaatggcttgccagattggccactgatggccattatagtagagcaaatggaagggcagagagatttgatcactgagaaaacagtttcccatcttagtgatcaggcaataaaaaatgtttactcttggtacataatgttcaccgtttgggggtgcttattctttggtgccatgaaggatccatattacgactcagaaacatataggggagatggaggagatggaactggcaactggatt

SEQ ID NO: 50144 - DNA, 427 bp, Glycine max
  Clone ID: LIB3167-031-P1-K1-B10
ctcattaccaacacgaaagcatagccaaaaccttttttcgaagtctctgattgtccgaatggctccggcaaaggcagagaagaagccggcggagaagaagccagcggcggagaaggcaccggcggagaagaagccgaaggcggagaagaagatctcgaaggaaggagggagcgagaagaagaagaagcgcacgaagaagagcgtggagacctacaagatctacatcttcaaggtcctcaagcaggttcaccccgacattggtatttccagcaaggccatgggcatcatgaacagcttcatcaacgacatcttcgagaagctcgcccaggaagcgtcgcgtttggctcgctacaacaagaagcccaccatcacctcgagggagatccagaccgccgtgcgtctcgtgctccctggtgaattggccaaa

SEQ ID NO: 50145 - DNA, 245 bp, Glycine max
  Clone ID: LIB3167-031-P1-K1-B12
ggctttgggttgtaattaaacattttctacatagctggattagtagtacttgtgaggaacttgtaacgtgaaattggagaggctaagcagaaatgcttctgcttgatgttaagtgttctcctgtgaatgttaattatgcacgaaatcgagagggaaggacgacggtaaaaaatactgatgaggttgagatcactatgaaaggtaatggcaagaaattggattgaggccattggagattttaattt

SEQ ID NO: 50146 - DNA, 429 bp, Glycine max
  Clone ID: LIB3167-031-P1-K1-B2
ctctcactcatggcaacaacactcatgttttttcgaccaaccatgatccgggcctccgctggttctcccgccaagcccgacccgagaaacaggaagcccgtttcctccaactggtgggctcctctgttcggatggcccgcggatccggactacatgggcccattgcagaaggcgagtgagaaatcggatccggagcgggaagtgggcctggacctgggccggcccagatccaagttcacagcggggtgcttcacggagaagaaggcgaaagagctgagaaagaagaccgtggaaacgtcgacgtttcatgacatcatgtaccactccgctattgcatccagactcgcgtccgatgtttccaaagggtacgagaaataaatgtttggttttaattaatgttttttctacccttagactcagactcactca

SEQ ID NO: 50147 - DNA, 430 bp, Glycine max
  Clone ID: LIB3167-031-P1-K1-B3
gataactagaaacagtgtgatgaaaattataggtccttgttttcttcgttgctacaattttggtagcatggcaatgccatgcgtacgatatgttccctctccgaatgaacactggctatggtgcccgtactccggaggtgaaatgcgcaagttggaggcttgctgtggaagcacacaacatctttggctttgagaccattcctgaagagtgcgttgaagcaacaaaggaatacatccatggcgaacaatatagatcagactccaaaacagttaaccaacaagcttacttttatgccagagacctcgaagtccatcccaaggacacatttgtgttcagtatagatggcaccgtactctctaatattccatactacaaaaaacatggatatggggtggagaaatttaactcgaccttgtatgatgaatgggt

SEQ ID NO: 50148 - DNA, 429 bp, Glycine max
  Clone ID: LIB3167-031-P1-K1-B4
cacctttcaaaatgcaaacatccttaacctttgctgcccccaacgttgtgcctttggcacagacaaagagtttctcccatgttgccatcttccctaccaatttgaaagccccacgctcttcacctcgttactctccgatcagggttgcaatcgtggagcctgacacttcaactgtggactacaactctgcgttctcagtgtttccagcggaagcatgcgaaactgttggaggggaagcctgcatggcagaaatgtaccctgaagtgaagctacagccagaagctaagacaccacgagttgttacagagaacgttgagagagagtatcttgaatacgatgatcctaaaacggtatttagaggagaggcttgtgatgatcttggaggaactttttgtgagaccgagtatcagaagggtgtctactagagat

SEQ ID NO: 50149 - DNA, 374 bp, Glycine max
  Clone ID: LIB3167-031-P1-K1-B5
cccacgcgtccggcctgggattatcaagagaggctttgagcgtggtggacttggctgccgcctggtggaggccttggaggcggtgtaggtgggctaggtaatggagacggtggtggcattggcggtggagcgggtggtggtggttggtttggttatgtgtgttgtggggtgttttggttgttttttttgtttttttttgttttgttttggtttgtgtttttgttttgttttttgttttatttttttttttgttttttttttttttttgttttttatttgttttttttgttttgttttggggagggggggtggggggtttttgttttttttatatattttataattttttatttattttataatgttttaatatt

SEQ ID NO: 50150 - DNA, 428 bp, Glycine max
  Clone ID: LIB3167-031-P1-K1-B6
cagagacttaagtgtgatggcattggtgaaaatgaagtgcaagagttcttggacagtgtgtgtccaatggagggggcactttcaccaggtgagtattggaacatatattcttctgcacatcaaatggggagctgcagaatgggagtcaatgagaaagaaggtgcagttgatgaaaatggtgagacatgggaggctgaagggttgtttgtttgtgatgctagtgtgcttccaagtgctgttggtgtcaatcccatgatcacggtccaatcaactgcatactgcatctctaatagaatagcagattatcttagaagggattaaataatctcagaagtttgttgaattttctttttcattagaagcatgctgttttagtttgattatcaaatttggtgtgtatttttactataatgttatgtatcaaatgg

SEQ ID NO: 50151 - DNA, 408 bp, Glycine max
  Clone ID: LIB3167-031-P1-K1-B7
cccacgcgtccggttctagatcgcccttttttttttttttttaatatagcttatgggttccattcctacctgaaattacaacctaaacatacccttcacaacccatcctccaccaccacaaccacaagatcttacaatcttacaagatgtcataaattactccaaacttcttttattaacactttcgcccccaacctttcccaattccagatctgccttcccgtttaaaaaaatcacggtcgggtcataactccaaaatcagaggggcgtaaaggagaagcataagattctagattaaggaagagaactaataaaggaacacaagattgtttcacccaacgcatttcttttctaccttctggctttttcctcctaaaaacctatggtacccacccacaacatcaaata

SEQ ID NO: 50152 - DNA, 417 bp, Glycine max
  Clone ID: LIB3167-031-P1-K1-B8
ggccgccctttttaaattttaattaaatataaaaaaaaaaaaaaaaaaaaaaaaaaaaaaaaaaaaaaaaaaaaaaaaaaaaaaaaaaaaaaaaaaaaaaaaaaaaaaaaaaaaaaaaaaaaaaaaaaaaaaaaaaaaaaaaaataaaaaaaataaaaaaaaaattaaaaaaaataaaaaataaataaaaatgggggggggctttttatgggatataattttttattatttttttttttttttattttttttttttttgggtagcttttaataaatttattgggcctatttttaaaaaatcttggttgggaaaaatccttgggttttttaaaattatattttttttttgaaaattttttctttatcctggtgggtttttatataaaaattgccattatttttttcttttaataatgt

SEQ ID NO: 50153 - DNA, 349 bp, Glycine max
  Clone ID: LIB3167-031-P1-K1-B9
cccacgcgttcgaccacgcgtacgtttttgtgtttacaacgatcaattgagggagcgtgtgcgcgccaggggagtccatgcaagcgcataaagataaatcgtactgaaggatatttaaccagcttgctaactattatgccaaatacatgatcaaacatatcgtggacacagctgtgttcaggatagagggtaccccactctctaatattacatactacagaaaaacatggatatggggtggggaaattaactgcgccttggatgatgaatggttaacaagggcattgtacacgggcatgtccgcgctatataaagtacaacatgctggtgggattagggttcatgattc

SEQ ID NO: 50154 - DNA, 422 bp, Glycine max
  unsure at all n locations
  Clone ID: LIB3167-031-P1-K1-C1
cacccttccgcccacgcgtccgcccactcttccgtccacacgttcggtcagcagagggccagaaacttcttgcctccagattgaaggagcagagagatcgccggagtgagagcttggctaagagaagatcaaagctttccagtgcagctaaacaagctgtcacagcataagatgctttcagacagagaagtttagtcttcgccctagtttttgatagtcccatttcatgatccctttcttttggtattttggtattcaaatacttttttaaagcatttcttttatgctttcttcgacagtttaattgaatttaagtttttttttccttgttggaattagtgtgaccttttgaagatgatatttatagactggcatatttctttctactnaaaaatatcaacaagtctaaaaaaagggcggcc

SEQ ID NO: 50155 - DNA, 422 bp, Glycine max
  Clone ID: LIB3167-031-P1-K1-C10
cttcaatttctaattagggtttcgcttagagtaaccaataaccatgggagtcttgggctttgtcgtccgcaaatccggcagcgaatggagcgccaagcaacattccggcgacatcgaggcctccgccgattccaccttcgatctccaacggaagctcgtgcaagccgctctcgccgttgattcctccggtggagttcagtcctctttctctcccgtgtctcctacctccgctgtgttccaggtgatagtgggtggtgcagtattcgttggaggtggtggtggtgctgttgcagctgcacctgcaggtggtgctgccgcagctgatgctgccccagctgctgagaaaaaggaagaaaaggtggaggaagagtccgatgatgatatgggattgggactgtttgattagaggtttttctgctttt

SEQ ID NO: 50156 - DNA, 267 bp, Glycine max
  Clone ID: LIB3167-031-P1-K1-C11
ccaaaaggagagtgcaataactcgttgtacattcctagtgtgtgggagagacatgggtaagatgttttggtgttggttcttgctctggctgtggccacaagtgccagaaacgttcccaaccccaaggatgctggtcttaaggaccagaagaacttcatcagctatggtggagttggtggttattccgggattgggaacaatggactgccttttggaggagctggtgccggaataggtggtggttttggctgaggtggtggacttgtt

SEQ ID NO: 50157 - DNA, 427 bp, Glycine max
  Clone ID: LIB3167-031-P1-K1-C12
cccacgcgtccgagtgaacacaatacatggcagcatcgccatgggattgagtattcggagaagcacttccatttccactcctatctcttcctccaaatccaaacccattttctcaactcttgttcgttcatctttcgcctccatttcccccacaaagtgtgttactcccaccactcttttcgtttctgccacccccttcttcaccgcctcacccaagcgcggctttcgtggtgggattgtggccatggccgccgctggctcgctccgcaaatcagaggaagagtggcgcgcagttctctcccctgaacagtttcgtattctcaggcaaaagggcaccgagttccctggaacaggagagtatgacaagttctttgatgagggagtttacaactgtgctggttgtgggacacctctctacaggtcctta

SEQ ID NO: 50158 - DNA, 420 bp, Glycine max
  Clone ID: LIB3167-031-P1-K1-C2
gttctgtgaacttttcaccttcactctgtatcactaatccttctctgcttggaggctgtgtttttttttttttgatggatccggcaaagggattggaagcttcgggggagaagacccttcaagcagaagtgaaagcttttttcgattctgctcctcctttgcagaaaagtgatgagataactcagaagttgaatcagttcattcaacgcatttcttctccatcagcgaatgggaaagttaggagaattgtttgtgtgacttctggtggcaccaccgcgccattggaacaacgatgtgttcgctatgtggacaatttcagttcaggtcacagaggggccacatccactgagtatttcctgaaggctggatatggtgttatctttctgtaccggaagagaaagtttcagccattttgtagat

SEQ ID NO: 50159 - DNA, 390 bp, Glycine max
  Clone ID: LIB3167-031-P1-K1-C3
cccacgcgtccggtgcattattcaatggccaccacagcagctctatccggaaccatggtgggcacctccttcatgaggaagcaacctatgacgaccaagagcctaaagacattccccaacgctctttttggtctgaaaggtggacgaggtggtcgtgtaacttgcatggcctcgtacaaggtgaagctcataaccccagaaggagaagtggagtttgaatgcccagatgatgttttcattgttgacaaggctgaggaagaaggcattgaacttccctactcgtgcagggctggttcttgcgtttcatgtgttgggaaaattgtgaaaggtgacgtggaccagtcagatggtagcttccttgatgatgaacaaatagaaagtggattggtt

SEQ ID NO: 50160 - DNA, 431 bp, Glycine max
  Clone ID: LIB3167-031-P1-K1-C4
cccacgcgttcgcccacgcgtccggttcctatcatcacttctcaaatctcgaaccctgtggttcgtgccgatcactaggtcacacttcatcaatggcgggtagaggcaaaaccctaggatccagcgccgctaagaaggccacctcaaggagcagcaaagccggcctccaattccccgtcggtcgtatcgccaggttcctcaaggccggaaagtacgccgagcgcgtcggcgccggagcccccgtctacctcgccgccgttctcgaatatctcgctgctgaggttttggaattggctggaaacgctgcgagagataacaagaagactcgaattgttccacgccacatccaattggcggtgaggaacgacgaagagttgagcaagcttctaggagatgttaccattgctaacggcggtgttatgcctaacatt

SEQ ID NO: 50161 - DNA, 430 bp, Glycine max
  Clone ID: LIB3167-031-P1-K1-C5
cccacgcgtccgggagagttcagataccatatacaatgtgaaagccaagattcaagagagggagggtatccccccagaccagcagaggcttatctttgctggtaaacagcttgaagatggacgaacccttgcagattataacatccagaaggaatctaccctgcacttggttttgaggcttcgtggtggcatgcaaatctttgttaagactttgaccggaaaaacaataactttagaagttgaaagttctgataccatcgataacgtgaaggcaaagatacaggacaaagaggggattccaccagaccagcagaggcttatctttgctgggaagcagctggaagatggtcgtactcttgctgattataatatccagaaggagtccactctgcatttggtgttgaggcttcgtggaggtatgcagatattt

SEQ ID NO: 50162 - DNA, 430 bp, Glycine max
  Clone ID: LIB3167-031-P1-K1-C6
cccacgcgtccgaaactttgcttgattaaatttttatggtggcacatggcagggtagttggcggcttgagaatggataaaagcatatctgacaaggatcagggagctcttgtagaaggttttgatttttgtttgccagaggttttgattcatgggtggttcttctgagtttgagacagagttgtactttggacagatatataaaatactgatcttcactccttccttccaaggtcagttaagtcattcctgttaaatttaatgtggtgtatcattgttatgcattacatataaggattcatcacatcaatcaataattgattcttttattggattattgagctaacccagttggcatttctggttgaatattggtttactcattttgtgcaaataggaaatgcaagtgggtttatttaaattctacatta

SEQ ID NO: 50163 - DNA, 419 bp, Glycine max
  Clone ID: LIB3167-031-P1-K1-C7
gtagttggatgctgaacactctcatcacacatgggttcaattaccaacactggcggggtgaaaccccgcatacatgataacccaaagcatgttctctattcccaccgctcttctctacacttgctgacacaaagttaaaacaccgtgaccagcgaattttccaggggtgggttctaaagccacggcggcttcccgggccaagaagaccgaatagccgggcgagagagtccagcgagtccacagcgtggaggagttcgagtccgcgctcgaatccgccaaagacaggcttgtggtggtggaatacgctgccagcgacagcgaggagagcagccagatataccctttcatggtggagctgagccgcagctgcaacgacgtggagttcatcctggtgatgggcgacgagtcggagaagacga

SEQ ID NO: 50164 - DNA, 414 bp, Glycine max
  Clone ID: LIB3167-031-P1-K1-C8
gttcatttgagtagtagtgatggctagcctcaaggttgcatgtgtggttgctgtgatgtgcatggttgtggtggccatgagtgctgcacccatggcacaggccgcaatcacgtgcgggcaggtcgccggcgacatgtctccgtgcttcagttatcttcgaagcggcggaaaaccgtcgcaggcctgctgcaacggagtgaagtccctcagcagcgcggcgaagaccaccgcggaccgccagggggcgtgcagttgcctgaaaaaccttgccaataatatgggacagagtttgaatgccggcaacgcagcctctctccctggcaaatgtggcgtcaacatcccttacaagatcagcaccttcaccaactgcgccaccatcaagttctgaagggcaatttttcagtcgcagaattc

SEQ ID NO: 50165 - DNA, 376 bp, Glycine max
  Clone ID: LIB3167-031-P1-K1-C9
aggaaccaatctattcaaattttgcaaccttttcacaattcaaacataggaacctgggaattttgctgttttttttttatcaatgtctcataccttgcaattttcatttcttttcaagtgcattcaattctccaatgaaggtagagaagatgaacagagttaggcctcgtggctttcaaattctatgctcttctgagcattccagtttcaaagatgaagatgatgctgaaaatggagggtctgatacttctttgtttggttgttttgttttgctgagaaaactttcaaaggaggtcaagtttcatcgcgggtgatacaggtggagagatttagcaatgatgtgtattatgtgatgatttgcaatttttaacttatt

SEQ ID NO: 50166 - DNA, 269 bp, Glycine max
  Clone ID: LIB3167-031-P1-K1-D1
ccacgctcggggtattggactacacacacaggctatagactgttgcaagcagcctagtcacttactggacttggtcaggcctttgctttacatcactggctctaagcattactcactgtagctcaaaggagcacctataaggattagcataacggccacatggagcggaacccatcatcacttgacgatggactgtcaacctgccgatcagacgatggcccatctaaggacgggggccggcacgtcctttgggcccatcggaagcgcct

SEQ ID NO: 50167 - DNA, 428 bp, Glycine max
  Clone ID: LIB3167-031-P1-K1-D10
cttaaccccacccctctccggtctcaaagccagcgaccgcgcctccgtgccatggaagcaaaactccagcctctccttctccagcccgaagcccctcaagttctacagaacaatcagagcagcagccgacgacgagaccacagaggcaccagcaaaagtagaggctgcaccggtcgggttcaccccaccagaacttgacccaaacaccccttacccgatcttcgggggcagcaccggcgggctcctgcgcaaggcacaggtggaggagttttatgtcattacgtgggactcacccaaagaacagatctttgaaatgcccactggcggcgccgctatcatgagggagggtcctaaccttctcaagttggccaggaaggagcagtgctaggctcttgggactaggctcaggtccaagtacaagatcaagt

SEQ ID NO: 50168 - DNA, 432 bp, Glycine max
  Clone ID: LIB3167-031-P1-K1-D11
cccacgcgtccgggttggtgcaagcacctcaagtaatgatccagagcacaaacaacaaaatccagagagtactgaatctagtcaagaagcaactaggacatcatcaaattctctagaacttccattaagttcctctaattcagtaacactagaaagcagccggagtttggaagaacagaatacaccattgttagagaatgacaaacctaaaaaaaccagcgatattaaagaatttaggacatcattgatacagaatgacaaactacttgaaactaatgaacaaaatatagagaataattctgagtcccaatcacaacacagtgtggtgatgccgaaacaaaatcattctgttgaacatgaggatggactgccaaagaaaatggggagaagggaaaggatgcttgatctgggaaagaagatgagcgagaaatt

SEQ ID NO: 50169 - DNA, 386 bp, Glycine max
  Clone ID: LIB3167-031-P1-K1-D12
aaaaaaaaaaaaaaaaaaaaaaaaaaatttaaaaaaaaaaaaaaaaaaaaaaaggggcgggaaaaaaaaaaaaaaaaaaaaaaaaaaaaaaaaaaaaaaaaaaaaaaaaaaaaaagggggcgccccttttaaagaacccaagtttacttccccttccttccaacttaaaatttttttttttgggcccccaaaattaaattcactgcccgctttttaaaaacctcggaactggaaaaaccctgcctttcccaaactaaatcgctttgaacaaaatccccttttccccagctggcgaaaaaccaaaaagcccccaaccaatcccctttccaaaaattttcccaccctaaatggcaattggaaccccccttttaccgccccttaaaccc

SEQ ID NO: 50170 - DNA, 423 bp, Glycine max
  Clone ID: LIB3167-031-P1-K1-D2
ggcagcatcctcagtctcatcaattgatgaactggacacggctacctcagactgggtaaagtacgtctagaacatgccgattaatatcagggagatggaaaatgcactctcccctcttcttttgggaaacatgggatgggcattagacatacatgtgatcatttcctacatccttaaacctgtcttgacacatgattaacggctgacctccaatgtgcatgaaaatttcagttcatgcaggcggtagtttcatctgcggtgccttttgctctcttgtacaaaatttgtaggcctactgtatagtataaatttgtattgtggtggagaaagagccactattcgatttggacctttggtcctgtcttaaaactcagggttgtgcttatcattcaaggtagttatttacatttcctgtcccgttat

SEQ ID NO: 50171 - DNA, 428 bp, Glycine max
  Clone ID: LIB3167-031-P1-K1-D3
tccactctttcacactcacctatggctccaatctcaaaactcattcctttcctattgttaacaacccttttagtttccctccaagttaatgccagagacagccaattcttcagcaaagtcacccctctcaacaacaacatcaaagagactgagactcccaaaaatgaaggccaagtaaacaagccagaacaacaaccaacattcattcctgaaactgaaaacagttatggcctatatggtcatgagactggtctgcaccctcccaccactacaacaactaatgctgcaccctacaccaccacttacaagccatacaaaactaccacagctgaagaggacactgccaagtactccaacaacaacaacttctacagcttcaagaaggatggctacaacaccaaccaaaatgagttgagtgaaacaacaag

SEQ ID NO: 50172 - DNA, 433 bp, Glycine max
  Clone ID: LIB3167-031-P1-K1-D4
cccacgcgtccgcccacgcgtccgcccacgcgtccgaaatgaaggtccttgttttcgtcggtgctacaattttggtagcatggcaatgccatgcgtacgatatgttccctctccgaatgaacactggctatggtgcccgtactccggaggtgaaatgcgcaagttggaggcttgctgtggaagcacacaacatctttggctttgagaccattcctgaagagtgcgttgaagcaacaaaggaatacatccatggcgaacaatatagatcagactccaaaacagttaaccaacaagcttacttttatgccagagacctcgaagtccatcccaaggacacatttgtgttcagtatagatggcaccgtactctctaatattccatactacaaaaaacatggatatggggtggagaaatttaactcgaccttgtatga

SEQ ID NO: 50173 - DNA, 422 bp, Glycine max
  Clone ID: LIB3167-031-P1-K1-D6
ggaaaactttggacaaaaaatggagtgctacacaaggccaaacaggagtgacatccacctgtcagcagaggaagaagccaccatagaggcaaagaccagagagtactttgatggggtcgcaccacaacgccacacaaagcctcaacgaagtgactattcagctcaatatgtcgatgctttctccaatgcccatcactcttctttaactataccagaattaacacaattccaactcctccagaacgatccccaagagaagaaattggtgtacaatggaagtcaagtaccggaagaatttgtggaaacagagtattaccaagatctcaacagcgtggacaaacaccaccatacgactggaacaggatttatcaaagtagagaaaaatggaaatgactttcacatagaaccagataatgacactg

SEQ ID NO: 50174 - DNA, 400 bp, Glycine max
  Clone ID: LIB3167-031-P1-K1-D7
cactcacactctttgtgaaaaaggggagtttcttattctttctagacgcttccatggatcggcgatttcttagacatggcggagcatcacgaacacgaggaagtgaagggtgagtccttgttggagaagatttctgggaagatccacgaccacgattcgtcatcttcgtcggattccgacaacgagaaaaccagcgcttctgactccttgaagtcaaaggttttcaggcttttcggcagagaaaagcccattcaccatgttcttggcggcggaaaaccggccgacgtttttctctggagaaacaagaagatatctgcatcgacactcggagttgcgaccgctatatggggtctgtttgaattgtttgagtaccaccttctcaccttggtttgccactttc

SEQ ID NO: 50175 - DNA, 396 bp, Glycine max
  Clone ID: LIB3167-031-P1-K1-D9
cccacgcgtccgatctcagattgcaattgcctcttctcttctcccagaatcggggggggttacaggtttaagggttttgttttcatttaggtcactaatccgatatcatgaagctcgatacgactagtctcgaatcgtttcccacactgattgcacctcaaaacgacgtcgccggagaactctccgccgctccgttctttgaccttccgaattccaatgacttcgatgggttcttgaaagacgctattcagatggtgaagcccgcgaagggtactacaactcttgcttttatatttaaagagggtgttatggtagctgctgattctcgagctagcatgggaggatatatatcgtcgcagtctgtgaagaaaattatcgaaatcaatccgtatatgc

SEQ ID NO: 50176 - DNA, 425 bp, Glycine max
  Clone ID: LIB3167-031-P1-K1-E1
cccacgcgtccgcccacgcgtccgcccacgcgtccgattttgtcgaattgggaggggatgcttataaagacattgatcggatgagggcttttgaaatagcacttaagacgtggggtgcatgggtagacgccaacgtcgaccctacgagagtgaaagtcttctttcaaggaatttccccatctcactacaatggcagcctatggaacgaaccaagtgcaacgagctgcatccggcagaagacaccggtgccgggatcaacctatcccggagggttgccaccggccgtggcggtgttaaagagtgtgctgagcacaatcaggaagccagtcactctgcttgacatcacaaccctctcactgctcagaaaagatggccacccttccatttatggtctcaatggagccgccggaatggactgcagccat

SEQ ID NO: 50177 - DNA, 427 bp, Glycine max
  Clone ID: LIB3167-031-P1-K1-E10
ctttgctctccaaaaatctcacacacacaggtatctagcaaatgggttctcaccaacaagaaccatggctattggagaatgggaaaccaagggttttgaccaaggagaccaggcatggccgttctgcacacagaatgtcctccacctctttgcgcaagaaatctagccgaactcttgtctcaaaggttccatgtgccactctcagaaactttctttcaaatttgcaagaggttattcttggcaccaagctttccattctcatccctgctattccagctgccatcgttgctgagtgctttggctttggaagaccttggatttttatattaagcttacttggacttacaccacttgctgaacgtgtgagcttcattacagaacaagttgccttttacactggtcccacagttggaggacttctgaatgc

SEQ ID NO: 50178 - DNA, 434 bp, Glycine max
  Clone ID: LIB3167-031-P1-K1-E11
agctgctgcaatcacagcacataaggctgctaatgaagatctaaggaagaagcttgaacactttcaatcaaaagtgaaggagtcccttggcacgcttaagccttattttaaccatgaaagcccagtcactgcaattgcggcaattcaagagttggaagtactgtcaactttggaccttaaagcgccattgagggatgagacccagcaacagccaccgccactgccacagacacagacacaggtgtatgaacagcaatatccccagccacagtcacagcagctgccgcaattttttcaaccacatacatcagccccgagctaggcctgaacatgatgaaggacaacttgtacaagtgttattaacaaggcacaagaggtaaaagatctgtaaagcggttaggaagtagtggtactgatttttctgagggtgaaat

SEQ ID NO: 50179 - DNA, 433 bp, Glycine max
  Clone ID: LIB3167-031-P1-K1-E12
cccttttctatttgagcatcatcatgttcaccgcagcgcagcccaaggccaagaaaacggcgtcgtccaagaagcccctctcccatcctaccttcgccgtgatgatagcggaggcgatagcgagtctgaaggagagaaccggttcgagccaatacgcgataaccaaattcatcgaaggcaagcacaaggagttgcctccaacctacaagaagcttgttctcgttcatctcaagaagtctgttgctgctggcaagctcgttaaggtcaaaaactctttcaagctcgcaccgactaagtctgctcctgttaaagccgctgctgctcccaagaagcccaccaaagctgcggctaagcccgccgccaagcccgcttccaagcccaaagctgctgcacctaagaagaaggctgttgccaagcccaaggccaaagctgc

SEQ ID NO: 50180 - DNA, 424 bp, Glycine max
  unsure at all n locations
  Clone ID: LIB3167-031-P1-K1-E2
agaaatttaaaacataatccatctatagaaccaggactagcagccatctgaattgaggatggatacttttcatgggatcgtaaggaagagaaaccgacattatcagatatcaatgtggaaataccagttggcagcttagttgcaatcattggcggtactggagaaggcgagacatcacttatttcagcgatgattggagagttacctactttagccaatggaaatgctacaatcagaggcactgaggcttatgttcctaagatttcatggatgtacaatgccacaggtcgtgaaaacatattatttggatcaaaatctgaatatgaacaatatcggaaggtcattgatatgactgctctacagcatgatctcaacttactactctgacgtgattntacagagatcggagaaagaggagtcaata

SEQ ID NO: 50181 - DNA, 421 bp, Glycine max
  Clone ID: LIB3167-031-P1-K1-E3
aagaaatttaagtgaggagctagagaatgatgatgaagtctgctatgtgtgcagtggtggttgtagcacttcttcttctggcggaggtggggcccatggctgaggctgtgacatgcaccccaacagagttgagtccgtgtcttccagcaatcacttccggtgctaaaccttccaatgcttgttgcacgaagctgaagcagcaaaaaccatgcttatgtggctacctcaaaaacgctagcttgaagcagtatgttaactctcctaatgcccgaaaaaccgttgcttcttgtgggattccctttccaacttgttaattaattaagccttcttataattaaagtgtgggatatatatatatatatatatatatatatatatatataaacagtttaatttatacacactttgatcctacaaagca

SEQ ID NO: 50182 - DNA, 63 bp, Glycine max
  Clone ID: LIB3167-031-P1-K1-E4
cccacgcgtccgcccacgcgtccgaaaaaaataaaaaaaaaaaaaaaaaaaaaaagggggggg

SEQ ID NO: 50183 - DNA, 435 bp, Glycine max
  Clone ID: LIB3167-031-P1-K1-E5
tagagaatggtcaaagtaaaaataaaatgaaggaattaaaaatggaaggcgtgcttgtcccacaactccgcgtacgcgcagccttttcaccaaattgtcgaccaaccatcttcgttatttgcaaatttcgtttcctttgaattacaatttacaagacaaggaaggcagcctcggatgttgttgttgtcgtcgtcgtgttcttaggttttgttctgagacgcagtttttcattcttctaatggcccagtccttcggtcagaccgagatcaactgggacaagctagataaaactagattctatgtcgtaggagctggactctttacaggtgtttcggtggcactttatcccgtttctgttgtgaaaactaggctgcaggttgccacaaaggatgctgtagagagaaatgtgttttctgttgcaaaaggactacttat

SEQ ID NO: 50184 - DNA, 409 bp, Glycine max
  Clone ID: LIB3167-031-P1-K1-E7
cccacgcgtccgtatccctacaacgtaataataaccaaaacagcagagagaagagagggtgtagacaaacacaatctctaatggcactcaggatgtgggcttcttccactgccaatgcactcaaagtctcttctacctccagacctcatctcttgcatcctttttctttctccagatgcttgtcttccgtcttggatggacttaagtatgcagattcacacgaatgggtcaagcacgaaggctcagtcgccaccattggtatcactgaccatgcccaggaccatcttggagaggttgtgtatgtggagctgccagaatcaggtggcacagttacccagaagtctggcttcggagccgttgaaagtgttaaagcaacaagtgacataaactcttcaatctcgggggagat

SEQ ID NO: 50185 - DNA, 421 bp, Glycine max
  Clone ID: LIB3167-031-P1-K1-E8
tgcactttctttcatggccgttcttttctccaatctcatcagcatcaccaacgacgccaaacctcgcttccctttcagctcaaaacccataatttgtggggccaaacggaacctcatccttcaaactcctctcgtctgcattggcattggcctaactcctcaagtctcagttgcgcaatcttcacctcaagagtcgtcgccgtccaaatcgcttctttctagctttgaaaacacgacatcttggtttcagttctacggtgatgggtttgccattcgagtcccaccagagtttaaggatatcatggaacctgaggatttcgatgctggacagtctctttatggggacaaggcaaagacagactttttcagcacggtttgcatcttccgatggatcagagattctaagtgttgttactcggcc

SEQ ID NO: 50186 - DNA, 411 bp, Glycine max
  Clone ID: LIB3167-031-P1-K1-E9
cccacgcgtccgcagatggcgatggtttccatggcattctgtgtcagcactgcgacggtttccgaatctaaacaggtgtcgtggagtggcatatgcaagtttgagcaacaaagcaagtactacatctttgggagtgcgagttacagagggagaggggaatttgccgaagcttgttctcacttccccggccggtagtgaggctgagatatacctttttggaggttgcattacttcttggaaagttcccagtggtaaggaccttctctttgttcgccctgacgctgttttcaatgggaacaaacccataagtggaggtgttccgcattgttttccacagtttggtcctggtccaattcagcagcacgggtttgcacggaatatggattggactgttgtcgattctgaaaacac

SEQ ID NO: 50187 - DNA, 373 bp, Glycine max
  Clone ID: LIB3167-031-P1-K1-F10
gacacacgcagactatttatctctacatatggcgctatgtttctcaatttgactggggtctctgatcaaactaacttccaagttctgtaccatctccaacaccattcatttaggatgtactccatgtgaagaataacacctctacacgcttcttgctgatagctggaaataatctgattgaacctgaccttagatcagatcctagagaccaattctccatcaatggcggttgcgctctatgattacatcacatccagatatagtgaccaccacacacacccattaggatctcagatagcgacattttaatgctaccacccaagctagatgtctctttcggatcccgactgacgataacgggggctgacatgat

SEQ ID NO: 50188 - DNA, 301 bp, Glycine max
  Clone ID: LIB3167-031-P1-K1-F12
cttttgctgagcttaaggtgaaggaactcaagaacggacgattggccatgttctctatgtttggcttctttgttcaggccattgtcaccggaaagggtccattggagaacctcgccgatcaccttgctgaccctgtcaacaacaacgcctgggcctatgccaccaacttcgtccccggaaagtgagcgtcaaagaacgaaatgacttttgagagtttttagatttgtgtttggtgaagtacttcagataaagtgaattatcttgtgtatccgaatccaacttaatgttacttgctttttac

SEQ ID NO: 50189 - DNA, 422 bp, Glycine max
  Clone ID: LIB3167-031-P1-K1-F2
gttcgttgccaagcagatattcatcaatgtcccctggtggtaccttgccttttctagggtgatcagtcccttcttcacacagaggaccaagagtaaatttgtttttgctggcccttccaaatctgctgatacccttttcagatatatagctccggagctggtcccggttcaatacggtggtcttagcagagaggctgaacaggaattcacctctgcttaccctgttacggagtttactattaaacccgctaccaaacattctgttgagttccctgtttctgagaaaagccatcttgtttgggaaatccgagtggtgggttgggatgtcagctatggagctgaatttgtgcccagcgctgaggatggatacactgtcatagtacacaagagcaggaaaattgctcccgccgatgagaccgttc

SEQ ID NO: 50190 - DNA, 428 bp, Glycine max
  Clone ID: LIB3167-031-P1-K1-F3
gatgagtagctttacggaacagctgaaatgtccattatatatactgttttttacttgtatgcgaataagactaatctctaattggataagggataaaatatggaagaaagaaacagggaaggtacaaatggaggaaaaataaaagtgaaaaaaattgttacttagttaagtaataaaaactaaaaataggaggaaaaaggaaatggaaagagtaattgaatgagtagaaaagaataaaagagaaaacaagtaagttgtattaaagaaatttttaggataataatagtaagtagatgcagattgattgatcgatcattgaagaatgatatgtgttgtagggtcattgcctggaaagcaattgtttgtttttatttatgtgtcacgcgaattgtgcattgattacgtgattgttgtgtaacggatggcat

SEQ ID NO: 50191 - DNA, 438 bp, Glycine max
  Clone ID: LIB3167-031-P1-K1-F4
cagaatatcagcaaaatcgttattcttgtcttctgattgctagcaccaaatccttgcagggctaccgtatcatttccacacgagcaaaaggattcagaccaaatccttgagaaacaacttgtcaagctcttcaatatctgccatagtaaaatggagaatgctgttccaaggaatgcttcagttaggcttgttgcattcaacttaggttgtcttccaggtggtgacaaagagataataacaagatcagaaacaacattactagcattggaagctgcatagagaattctaatgccaggtgggcttatcagcatagtggtttatgttgggcaccctggaggacggtgataattctaatgctttactttgtgtcattaatatattagtaggtccttgaactatttgagaatttttaataaggtctgtctttaaactaaaaag

SEQ ID NO: 50192 - DNA, 438 bp, Glycine max
  Clone ID: LIB3167-031-P1-K1-F5
cccacgcgtccgcgatcatactggcgagttccgctggtcaagtaaatgggaaacagagatgcgcaattaacagcgtgtcttatgttgtcccagacacccctcttaagctcgccgattacttcaaaatctccggtgttttccgccccggaagcatatctgacagacccactggcggcggcatttaccttgacacatctgtgttacaagctgactacagaaattttgtcgagattgtcttccaaaacaacgagaacatcgttcagagctaccatcttgatggctactctttctttgtcgttggtatggatgggggacaatggacaactgctagcaggaaccagtacaatctccgagatgcagttgcacgttgcaccacacaggtataccccttttcatggactgctatttatattgcccttgacaatgtgggaatgtgga

SEQ ID NO: 50193 - DNA, 450 bp, Glycine max
  unsure at all n locations
  Clone ID: LIB3167-031-P1-K1-F6
acccacgcgnccgacggaggccagnggaataaagcgtttttgcccctactcttattactctccgtgttgtgcgccgtcggatcatcatcatcggccatacgtttcagattggcacctctggcacgaggtgccgcggagaggcaggttcccatgcaagcgggtgcacccttcaagattgcgctgttcgccgacctgcactttggggaggacgcgtggacggactggggcccacgacaagacttaaactccatcagggtcatgagtacggtgctccacaatgaaaatccagattctgcaatatatctcggtgatgtcatcacggctaacaatataatgattgcaaatgcaagcttgtattgggatcaggtaaccgccccagcaagaaatagaggcataccatgggccagtgtatttggaaaccatgatgatgctgcatttgagtggccattg

SEQ ID NO: 50194 - DNA, 411 bp, Glycine max
  Clone ID: LIB3167-031-P1-K1-F7
aaaaaaatctcaacaaaatttgagcatgccacatatggagcttaggtctacctgcagcacctgcttctttctcttgattctcatcctggctctccctcgtttctcaagaggggaatctgaagcattgcatacagagatatatgagattgattatagaggtccagagacacactcttcaggtgttcctcctcctcatcacttccatattggtaagcagcattcaacttctcatcctcaaaaaggctcagtcagaggaaccaaagctttgggcttaagggatagcacttacgatgaaaataaggtcaagaaagtacatgaatgatcatcaggaagctttacaaattaaatggagtatgactttgattagtgctctcatacataaatatttttgttagagagtgtaatgatagt

SEQ ID NO: 50195 - DNA, 404 bp, Glycine max
  Clone ID: LIB3167-031-P1-K1-F9
gcgctgcatgcactttcactccaaacaactcaatctgctaggggtgctttgcttgcgatcttgttggaggttcttctgttcaagagaacatggtaactagaattgtggatcttcggtcagacacagttacaaagccaaccgaagcaatgagagctgctatggcaagtgctgaagttgatgacgatgttctaggctatgatccaactgcgtttcgcttagaaacagagatggcaaagacaatgggcaaggacgcagctctttttgttccatctggcactatggggaaccttatatctgtacttgtccattgtgatgtcagggggagtgaagttattcttggagacacttgccatattaacatttttgagaatggaggtattgcaactattgagggagtgcattct

SEQ ID NO: 50196 - DNA, 423 bp, Glycine max
  Clone ID: LIB3167-031-P1-K1-G1
attccttacagagaaggacaatcaattggggtaattccagatggtattgacaagaggggcgaacctcataaactgagattgtattctattgctagcagtgccattggtgattttggagattccaaaactgtttctctatgcgtgaaacggctggtgtacacaaatgaaaatggagaaattgtcaagggagtctgctcaaatttcttgtgtgacctgaagccaggagctgaagtaacaataactggacctgttgggaaagaaatgcttatgccaaaagatccaaatgccaccatcatcatgttgggaactggaaccgggattgccccatttcgctcatttttatggaaaatgttctttgagaagcacgaagattacaagttcaatggtttggcatggctcttcttgggtgtccctacaagcagc

SEQ ID NO: 50197 - DNA, 434 bp, Glycine max
  Clone ID: LIB3167-031-P1-K1-G10
ggaggagcggcattaaaaatgcagatcttcgtgaaaaccctaacggggaagaccataaccctcgaggtcgaaagcagcgacaccattgacaatgtcaaggctaagattcaagacaaggaaggcatccctccggatcagcagcgtttgattttcgccggaaagcaacttgaagatggaaggaccttggccgattacaacatccagaaggaatcaacccttcaccttgtcctcaggcttcgtggtggcatcatcgagccttccctcatggctttggctcgcaaatacaaccaggacaagatgatttgccgcaaatgctatgctcgtctgcaccctagggctgtgaactgccgtaagaagaagtgcggtcatagtaaccagttgaggcctaagaagaagatcaaagtaattctgggtgggatattgttggtctctac

SEQ ID NO: 50198 - DNA, 435 bp, Glycine max
  Clone ID: LIB3167-031-P1-K1-G11
attttggtttacaaaaacaatcatcaatcatgggaagcgatagaaaatcgaaacgagcttcaccctcccaacgtgaagatgagaagagaagcaagaggcagagaacggtagaggatgaggaaaggaagaagcggaaaagggaaaagaaggagaaaaggaaggacaagaaatctcaccagcattccaaagaaaataattctgataaggggaagttgaaagataagcacagaagcaaacatagcaaaggtgatgaccatatggaattccaagaattgtcaaatgatgactattttgcgaagaacaatgagtttgctacctggctaaaagaagagaagaatgtgtttttctctgatcttttggctgagtcagcgcgcgtgttgttttctgatttcgtcaaagcctggaacaaaagaaagcttgattcaaattactatg

SEQ ID NO: 50199 - DNA, 407 bp, Glycine max
  Clone ID: LIB3167-031-P1-K1-G12
gaagccttttcttttcttcttcctctgtcttgtcttcaacctcgttttcttttctgcgtcttctatcaccgattccgattcgctactctttcttcttcttccttttttattgatcctctctgcgatcacgaattttcccattttctccgtttcctcggcgaccaaacggaggagaagaacgcagttctgaaaacgattggaaaatgctgggaactgcactgcaattcagcggcgttcgcggcgaggatcggttttacattccggtgaaggcgaggaagaaccagaatcagcggaaacagagtcacagagccaagaacaacgaacctgaaaacgcggatttagcttcgaagaacaaagtcgatgtctctgaaaatagcaataacaatagcaacatcaaaagcaagagc

SEQ ID NO: 50200 - DNA, 422 bp, Glycine max
  Clone ID: LIB3167-031-P1-K1-G2
tctcactctcctctgatatttctatattttggtgctctgtgtctctacgatctggagccaacggtccaaaatgttcggggcttgtgctgcttgttttcccaggttttagagctccaaaccttcagatccacctcattcgtctccagatcttccttccttgataacgttttcgggttcgagaaggcacttgtttgtttgtcgtacgaaatggagactaaaccgagttcggtgatggttacgctcagttacggcgcgttgacgtgcgccgcggaagttctcgcgactttgctagcttctgctgtcgtcaaagccacgcttttggccccggatctctaccggctgctattgaccaacacgcctacaaccaaaggagagagaaaaactcagagtcaagacaagcaacgtgatgcagagggcgaaga

SEQ ID NO: 50201 - DNA, 117 bp, Glycine max
  Clone ID: LIB3167-031-P1-K1-G3
cccacgcgtccggccctttttttaaaccctcctaatttgagtactcgttgggagcaagcaacatacaatgtatgaatttcttgattatggtaaaacatcagagttattttttgctgt

SEQ ID NO: 50202 - DNA, 436 bp, Glycine max
  Clone ID: LIB3167-031-P1-K1-G4
cccacgcgtccgcccacgcgtccgatcactcatataatactctgtatcatttcatggcgataatcatccatagctactgaagaaaatggcaaccatctctgctgctatcacaaccccatcgatctcccgcgcaactcttgtgcaaaagcgggtctcatctcccgttcttggtttgccagcaatgggtaaggtgggaagagtgagttgctccatggaggaaaaaccttattctgtgaaggaaagcagctctagcatgttggggatgggggcatctctgatggcagctgccagcgctgcagccatgtcaggcccagccatggccttggtagatgagagactgagcactgaaagaaccggacttccctttggcctcagcaacaatcttcttggttggatccttttcggcgtctttggtcttatctggactctctatttt

SEQ ID NO: 50203 - DNA, 440 bp, Glycine max
  Clone ID: LIB3167-031-P1-K1-G5
cactagctctgtgcattcttctctcgctctctgccttccatcacactcggcatttgctttcccaagatagtagaagatggcagacactgaggatattcaacctcttgtttgtgacaatggaacaggaatggttaaggctggatttgctggagatgatgccccacgtgctgtgtttcccagcattgtaggtcgtcctcgtcacactggtgtgatggttggcatgggccaaaaagatgcatatgttggtgatgaggcacaatctaagaggggtattttgactctcaagtaccccattgaacatggaattgtgagcaattgggatgatatggaaaagatttggcatcataccttctataatgagcttcgtgttgccccagaagagcatccagttctcttaactgaggcccctcttaaccccaaggctaatcgtgagaagatga

SEQ ID NO: 50204 - DNA, 438 bp, Glycine max
  Clone ID: LIB3167-031-P1-K1-G6
atcaaagccatggccacctccaacttctctattgttctctccgtctccctagccttcttggtggtgctacttaccaaggcacactcgaccgataccgtttctttcaccttcaacaagttcaacccagtccaaccaaacattatgctccaaaaagatgctagtatttcatcctctggggtgttacaactcaccaaagttggcagcaacggcgtgcccacctcgggatctctcggtcgtgccctttacgctgccccaatccagatttgggacagcgaaaccggcaaggtagccagctgggctacatcctttaaattcaacattttcgcacccaacaaatcaaactcagctgacgggcttgccttcttcttggcacccgtcgggtctcagccccaatccgacgatggatttcttggtcttttcaacagtcccttaaaggac

SEQ ID NO: 50205 - DNA, 421 bp, Glycine max
  Clone ID: LIB3167-031-P1-K1-G7
cccacgcgtccgggtagaaggagaggaattaaaaaagaaagaagaagaaggaaaagagggaatggcgagagtacgagacagagagcgaaagtgacggtgtgattagcaagtaaagacatggatggtgttaggaactgataaagctaccactctggcttagttagctaagtttggttttggttttggatgagaagaaaagtggaggaatcgacacgagtgagtgagaacaagacagtgcacttgtcatcagtcaacatacacgcatgcattcattcagttgtgtttccgtgttccttggtgcttatattttatcaaattgcacaagcataatatctccttttgcacaaaatatagtaagtgttctggcggtctggttttacacattaatgaagttatgaggactgaataaaagattcaattt

SEQ ID NO: 50206 - DNA, 421 bp, Glycine max
  Clone ID: LIB3167-031-P1-K1-G9
ggaaacaagggcttttgcagttcttgcatgtgtcctgtctgtttgaactttgggggtgcaagcaacacttgtagttggattggatgtgatgtttgttcacattggtgccatgctacttgtggtattcagaagaatcttatcaagcctgggcctagcttgaaggggccttcagggacctcagagatgcagtttcattgtattggctgtggacatgcctcggaaatgtttggttttgttaaggacgtgtttgtgtgttgtgctaaggattggggtcttgaaaccttgatgaaagagcttgactgtgtaaggaagatcttcaggggaagtgaagattgcaaagggaaggaattgcatgttaagactgatgacatgctattaaagcttcaaactaaaatgatatctcctttggatgcctgcaatt

SEQ ID NO: 50207 - DNA, 414 bp, Glycine max
  Clone ID: LIB3167-031-P1-K1-H1
cacgaagcgatatgggttggaatggacgtctcaaaaacatggtcatcgtgattactgtaatggtggccttggttgttgttcaacatgtgaagtgtggggactcagctcgcatattgcttcagcatggtggcttcgttcaacgaagtagcaccaacttcgttctgaataacaagcgtttctacttcaacggattcaacgcgtactggttaatgtacatggcatctgacccatccacaaggcccaaggtcactgccgttttgcaacaagcttccaaccatggcttaactgttgctagaacttgggctttcagtgatggaggttacagagcacttcaggtttctcccggttcctacgacgagaaagtattcaggggattggactttgtagtatcagaagcggtaaaatatggggtgc

SEQ ID NO: 50208 - DNA, 106 bp, Glycine max
  Clone ID: LIB3167-031-P1-K1-H10
gcgaatctgactaaacaaattgaattttttcaattaacttgtaaaaaaaaagaggagtgaaatggagttttttgaaacatcggaaaaagtagtcgtttatatgaat

SEQ ID NO: 50209 - DNA, 358 bp, Glycine max
  Clone ID: LIB3167-031-P1-K1-H11
cccactcgttcgcccacgcgttctgtttttgtgaccccagcttttgatgcggaaggcccaggtctcaatggccttgacctctctgcagcaagattagaccttggtcctggtggtgttatcccactccacactcaccctggtgccaatgaactactcattgttctccaaggtcacatccttgctggattcatatcttcacgtaacatagtttatcagaaggtgctaaaaaagggagagctcatggttttcccacaagggttgttgcactttcaaattgctgttggtaagagaaaggcccttgcttttcctgtcttcagcagtgcttttccttgccttcaaatccttggctgtgcactct

SEQ ID NO: 50210 - DNA, 374 bp, Glycine max
  Clone ID: LIB3167-031-P1-K1-H12
cggacgcgtgggtgcagagtgcagagccttctctcctctattttggcttccaaccggtttgctccattcattctcaacaacaaaccaatctctatattttgcttagacaatgagggggagcttgtggcaacttgggcaatcgatcactcgccgtcttgcccatggagataagaaggctgttgctcgccgatgttttgcctcagaagctgagctgaaaaagacagtgtttcatgacttccatgttgctcatggtgggaagatggttccatttgctggatggagcatgccaatccaatacaaggactcaatcatggactctaccatcaactgtaggcagaatggtagcctttttgatgtttcccatatgtgtgggc

SEQ ID NO: 50211 - DNA, 428 bp, Glycine max
  Clone ID: LIB3167-031-P1-K1-H2
ccctaattcccaaattctctcatttttcaagtttcaaccaagaaaagcagcaacaatgtcgggtcgcggaaagggtgggaagggtttaggaaagggaggagcaaagaggcatcgcaaggtgctccgcgacaatatccagggaatcacgaagcccgcgattcggagactggcgagaagaggtggcgtgaagagaatcagtggtttgatctacgaagagaccaggggcgtgctcaagatctttctcgagaacgtgattcgcgatgccgtgacgtacacggagcacgctaggagaaagacagtgacggccatggatgtcgtttacgctctcaagaggcagggaaggactctctatggtttcggaggctgagggtttggccttctttggtggctttggtttgtgtaaatggaaagaatttgtgttttgtagt

SEQ ID NO: 50212 - DNA, 426 bp, Glycine max
  Clone ID: LIB3167-031-P1-K1-H3
cgtcttttacatcaggatggagtctcaggtgaagcacgcacttgttgtcaaagtaatgggtcgtactggatccagaggacaggtgacccaggttagagtgaagtttctggatgatcagaaccgtcacatcatgaggaatgttaaaggaccagtgagagaaggagacattctcaccctactcgagtctgaaagggaagctagaaggttgcgctaagagggtctttctttcttgatctttatggtagttagtcggtgctaaaggttatagcaccctatcttgtcttggatctattttcattcgaattatggcttgagttttgctgttttgagtctaagcttcaaggttgaagtatgttttggcttaatatatgattttaattatggcttgagttttggattaatatgatttggcttctatatagtgaa

SEQ ID NO: 50213 - DNA, 452 bp, Glycine max
  unsure at all n locations
  Clone ID: LIB3167-031-P1-K1-H4
caccaaccacaagatgtttctccacattgtgttcctnccttttccttcntctcatccactgtgccatgcgcactgtccannagacttctgtgtggcnagacctcaaaggtgcagacacccctgcaggctacccctgcaagccacctgctaatgtcacttcagatgactttgtgtacactggcttagctgaagctgcaaatgtcacaaacataatcaatgctgctgtgaccccagcttttgttgctcaattcccaggtctcaatggccttgaactatctgcagcaaggttggaccttggtcctagtggtgttatcccactccacactcatcccggtgccaatgaactactcattgtgcttcaaggtcacatccttgctggattcatatcttcaggtaacatagtttatcagaaggtgctgaaaaagggagagctcatggttttcccacaaggg

SEQ ID NO: 50214 - DNA, 373 bp, Glycine max
  unsure at all n locations
  Clone ID: LIB3167-031-P1-K1-H5
cccacgcgtccggtagaaacgtgaaccatgtatctagaatggatcttcaacaacgacgggctggaacttcactttattccttacctgtcaccggggcatgtgatccctctctgcggcattgcaacactcttcgcctcacgcgggcagcacgtgacggtgatcaccactccctactacgcccaaatcctccgcaagtcaagcccctccctccaactccacgtcgttgactttcccgccaaagatgtgggccttcccgacggcgtcgaaatcaagtccgctgtcaccgaccttgctgacactgcaaagntntaccaagccgccatgctcctccgcagacccatcttccatttcatggaccagcacccacctgatt

SEQ ID NO: 50215 - DNA, 406 bp, Glycine max
  unsure at all n locations
  Clone ID: LIB3167-031-P1-K1-H6
cccgcgcgtncggtccaactcagtagtcaacactaggcactctctattcccattcattgcagaagaagatggaggctcacccctacgtcccacgcgatttgcacttacccggctacgctccctgcttcctttccatgtccaacattctttccgtcttcgcctcctcctcattgctcatcgtcactctcgtctggatcttctctggacgctttaagaaaaccaaagttgatagagtgctgatgtgctggtgggccttcacaggtctcacacacattattcttgagggttattttgttttctctcctgagtttttcaaggataaaactggcttctacctggctgaagtttggaaggaatatagcaaaggggattcaaggtatgcaggaagggatgcaggggtagttac

SEQ ID NO: 50216 - DNA, 356 bp, Glycine max
  Clone ID: LIB3167-031-P1-K1-H7
gctagctattagttcgatgttgtcgtaagtgaggggccaatatggtgaagatagctcgagtgactttgcatgactatattagcgctctctctttaaaggctaatttcgcagagttccacacaactttgattatgaggtccgctggtgttggatcagccatcgcttacaacgagcttacaaaagatgcagcacttgtatccaacgacgctggaggcagcagctggggcacatgcatacgcactggaaggaggtgtgtacgacaccggctatattttacgcggacatattgacccagcctgaacattttgattgggcgctggggggacataactctcactactggtagaaatactgga

SEQ ID NO: 50217 - DNA, 422 bp, Glycine max
  Clone ID: LIB3167-031-P1-K1-H8
catttgagtatatctgttatagtttatttactactgaaagatggattcgaagaggaagatagcattacttatcttcggtctgctggccatgctccttttcatctcctcagaggtggcagccagagaactgaaagaggtcactggtgctggcttgtctggtggccgtggcgtaaactttggtggctttggtggcattggtggtggccctggcttccgctttggcttcaataatggcttccccttcttcttccctggattccccagcttccgtggattccccggcttccctggattctccggcggccctggattccccggcactggattccccggcactggattccccggcatcttccctggctttggtggtggcgtcggcggcggcttctcaaacactggctttggtggtgttggtggcgttg

SEQ ID NO: 50218 - DNA, 422 bp, Glycine max
  Clone ID: LIB3167-031-P1-K1-H9
gttctctgtagagtaacagatctttgcattctctggttataattccgagccgggttgcttgttagcactgttaacttcctctaatggctcatcgctacgatagtaatcccttcgacgaagaagaagtcaaccccttctccgaaccagctgtaaggggaaaaacatcaagccaatcaagttatagcgggggtgcattttacactacaaatcctggaagtgttgcccctgccacaaattcaaggctatctcctcttaatcctgaacccgctgattataactatggctttggtgcgacagttgatatacctcttgatccatcaacggatttgaaaaaaaaggaaaaggaactccaagccaaggaggctgaattgagaaaaagggaacaggaagtcagacggaaagaagaagctgctgcacgagct

SEQ ID NO: 50219 - DNA, 393 bp, Glycine max
  Clone ID: LIB3167-033-P1-K1-H10
cccacgcgtccggaagaaaatggcaaccatctccgttgctatcacaaccccatcgatcacccgcgcatgtctagtgcaaaaacgttctcttgggttctcatctcccgttcttggtttgccagcaatgggtaaggtgggaagagtgagttgctccatggaggaaaagccttcttctgtgaaggaaagcagctcaagcatgttggggatgggggcatctttgatggcagcggccagcgccgcagccatgtcaggcccagccatggccttggtggatgagagacttagcactgaaggaaccgggctacccttcggcctcagcaacaacactttttggttggatccttgttcggcgtcttcggacttatctgggctctctattttgtctacactttc

SEQ ID NO: 50220 - DNA, 394 bp, Glycine max
  Clone ID: LIB3167-033-P1-K1-H11
catgaagcttggcacaaagctgaagataaatatgttttgagtgcactggccgttgctggtgtggtggcattgataggctcatctgatatcatctcatcaattgatagtcttcctttaattcctgggcttttagacgtcgtatgcattggctacactgggtggtatgcttacaagaacttcgctttcaagccagacaggcaagcttttctactaaaggtaaatgaaacatatatcgaaatacttgaaagcagcttacatagttaggaatcgatgcttatattcttttcacacaaaaaagatctatctttcagtttttattgaaaatgcaaccttgtcacaatcagcttactgaccattactttatcgcatgtgatgtaatttaacctgaaaataa

SEQ ID NO: 50221 - DNA, 337 bp, Glycine max
  Clone ID: LIB3167-033-P1-K1-H12
ggaaactactgctaaaaatgccaccaatgttgaacaggctttcatggccatggctgctgaaattaataacagaatggcaagccaaccagtgaacattgccaggcctccaacattttatattcgaggacagccagtgaaccagaaggctggttgctgctcgacttagaaagagactaattctttgtggtctcagacgtttacatgtgtcttcactggcatgtaaaactagcttttcacatattgctttcatatgaagattgttcgtcatgatttgctccttaatcgtaagtcgtcgttaaaactttcattctttttctatgtatttgaaattaaaaga

SEQ ID NO: 50222 - DNA, 448 bp, Glycine max
  Clone ID: LIB3167-033-P1-K1-H6
gctgcccagatctacttgaagtgagctatcaccaaattggcctaaagctaactgggatgactggttgagacttaaagagaatcataaaggaccacagtttatccggcccgaagtatgcagaacatataattttggtgagcatggttctagtttgggacagttttttaagcaatatcttgagccaatcaagctgaatgatgtcaaggttgattggaaattaatggatctgagctatttactggaggataaatattctatgcactttgcgaatgttattaagaaagctacacctgtctatggagctgacatggttctaaaggcatctaatatagatggcgatgtgcgcatcaaatataaagatcagtcagactttgaaaacattgctcaccaatttggtatatttcaagagtggaaggatggtgtgcccaggacagcatataaaggagta

SEQ ID NO: 50223 - DNA, 403 bp, Glycine max
  Clone ID: LIB3167-037-P1-K1-A10
caagatctgcaacaacttcaagacgttctgtgaagagtcagaagaaaaatgaagattcttcaggagtgcggagaaagagtacaagtgacgcataagatgagtcagaggaagaagagagagatgaagaaaatgaggaggaaaatgaaaatggtgttcctaacaaatctgaggatgaaacaccagagaaatctgaaagtgaagacaaaagtgattctgggagtgaatctgaagatacaaaagaaaagaaaaaaccttctaaaacatcatccactaagaaagaatctgctaagaaaagtaaaattgagaaaattacagttgcaactaaaactcgatcaccacataaaagaacaccttaagaagcttcattcaacctctcaaagtctgatgatgacagtgatgaaag

SEQ ID NO: 50224 - DNA, 292 bp, Glycine max
  Clone ID: LIB3167-037-P1-K1-A11
ttcaatggccaccacagcatctctatccggaaccattgtgagcacctccttcatgaggaaggggcctatgacgaccaagagcctaaagacattccacaacgctctttctggtctgaaaggtggacgaggtggtcgtgtaacttgcatggactcgtgcaaggtgaagctcataaccccagaaggtgaagtggagtctgaatgcccagatgatgctttcatcgttgacaaggctgaagaagaaggcatagaactttcctactcgtgcagggctggctactgcgtttcatgtgtt

SEQ ID NO: 50225 - DNA, 463 bp, Glycine max
  Clone ID: LIB3167-037-P1-K1-B10
gttctagatcgcgatggccatcatttcatgtactagtaactaagattattttgattcataacggtagggagcgtccatgctaaaaaaaaaaaaaaaaaaaaaaaaaaaaaaaaaaaaaaaaaaaaaaaaaaaaaaaaaaaaaaaaaaaaaaaaaaaaaaaaaaaaaaaaaaaaaaaaaaaaaaaaaaaaaaaaaaaaaaaaaaaaaaaaaaaaaaaaaaaaaaaaaaggggggggcctttttaaagaaacaaatttaacccaccggggatgcaaatatataaaatttttttatggggcacccaaattaaaaaaaaggggcgggggtttaaaaaactttaaactggaaaaaaccctgggttccccaaaataaatagccttgaaaaaaaaccccctttgccaagtgggtattaaataaaaaaggcccaaacctatgtcctttaaaaaaatttgccaccctaaaag

SEQ ID NO: 50226 - DNA, 457 bp, Glycine max
  Clone ID: LIB3167-037-P1-K1-B11
gaagcttctgttcacgactacagaggggagaaattcgccgccaaaggtaacgcctttgtcggcgatggaggcagcgaaggaatttacgcttctgcccccaacctcaccgacgcttatccaccgccaaatcccgactcttacatacggtttgaaaggattacatttaggagaaacaaggacttttctaactttagctcatggcctattcaagctgttatttttgaagtagaagatagagagacaattggtggttcagcttatggtggtcaaagggctgtctgctgcaccggtgatctagcaaaactaggtgtgtgcactgaaggacaggtcatttaccgcccttctgtggagaatcccgattggccctaagtttttggtgtctcttttgaaatggatggtgaagtggcagtgctgccattgaaatctatacagatcacaaaaacctggatgtataact

SEQ ID NO: 50227 - DNA, 248 bp, Glycine max
  Clone ID: LIB3167-037-P1-K1-B12
aaaaaaaaaaaaaaaaaaaaaaaaaaaaaaaaaattttttaaaaaaaaaaaaaaaaaaaaaaagggaaaattaaaaaaagaggtggagtattataaaaataattattaaataattttatttaaaatatattaatttttttttaaattaattttaaataattttaattttttttaattatattaagttttggtatttttaaatttttaaatttttaagttgttttttttagtagtttaatttttttttt

SEQ ID NO: 50228 - DNA, 462 bp, Glycine max
  Clone ID: LIB3167-037-P1-K1-B4
cccacgcgtccgaatttaatcaagcctgccatggcttcctcgtgtgcttcctctgccattgcagctgttgccatctccacaccaagttcccagaagaatggatcactcttgggaagcacaaaagcttcttttcttagtgggaggaaactgaaggtgaacagttttacagcaccagttggagcacgatccagcactacagtgtgtgcagttgctgagcctgataggcctctgtggttcccaggcagcacccctcctccgtggctagatggcagtttgccaggagattttggctttgatcccctaggtcttggatctgatcctgagagcctgagatggaatgtccaagcagagcttgtgcactgcagatgggccatgttgggagctgctggcattttcattcccagaattcctcacaaagattggtatcctgaacaccccttcatggtacactgctggagaggt

SEQ ID NO: 50229 - DNA, 413 bp, Glycine max
  Clone ID: LIB3167-037-P1-K1-B5
cgaccacgcgtgcgcccacgcgtccgttttctatgtttgcttgcattgattatttggaacaagattgttgctgttgagccaggaggcctatgctagagcgttttttgtttttggtgattcgctagttgacaatagcaacaataactacctattaaccactgctcgtgccgactcatattcttatggcgttgactatcccactcacaggtccactgtccgtttctccaatggcctcaatatcccggacattatcagcgagaaaattgggtcagaacccacattgccgtatctaagtcgcgagctctatggatagaagatactcgtaggtgccaattttgcttctgcggggataggaattctcaatgacactgcaattcagtttatacacataattcgaatcaccaaacaattac

SEQ ID NO: 50230 - DNA, 285 bp, Glycine max
  Clone ID: LIB3167-037-P1-K1-C10
acaaagataactataatcaatgtgatgaatatgaagtttcataagatccttttgcagccacattagtgggggaatctcagatgcagggatccaatatctaacctcataagaatgaacaatgaatatagggccctttcttcagagcgcatagaacacgactcctgcttactgccatagcacacaacatacctggctatgtgaccattcctatagtgtgcggtgccgcaacactaccttacttgcatgttgaacagtatctaccagtctgacaatcatgtaatcaac

SEQ ID NO: 50231 - DNA, 410 bp, Glycine max
  Clone ID: LIB3167-037-P1-K1-C11
tctcactctcacttttgattttttgccctaaaaccctcgctgccgtcgtggtggccgcccaagaaaagagaatagagagcgcaaacgagtcttcatcttcgactcaccatgaagctcgtcaggtttttaatgaagttgaacaatgaaaccgtgtcaattgagctcaagaatggcactattgttcatggcaccattacaggtgttgatatcagtatgaacacacatttgaaaacagttaaactaactctgaaagggaaaaatccagtgactctggatcatctcagtgtgaggggtaacaacatccgttactacattcttcctgacagcttgaatctcgagacccttgcttgtggaagagacaccttagaatcaaacccaagaagccaactgctgggaaaccctttggacgt

SEQ ID NO: 50232 - DNA, 303 bp, Glycine max
  Clone ID: LIB3167-037-P1-K1-C12
cccacgcgtccgctggctatgcttcttggcaagagttagatcggacgaggattgcgtgtacacggtgtacgttcggacgggttcgatcatcaagggaggcaccgattcagtaattggtctgaagctatacgacaagtccggctacggcatatacatcaccaacctcgaggcatggggcgggttaatggatccgggtcacaactactacgagcggggcaacctcgacatattcagtggtagaggcccttgcttggaagcacccgtttgcgaggccaacctaacttctgacgggtcggggcccca

SEQ ID NO: 50233 - DNA, 359 bp, Glycine max
  Clone ID: LIB3167-037-P1-K1-C5
acccacataactagatgcagagttctgcatcggaacatgacttgcaaaatatctattgacaggatggtacattgaacattcagctgggctggattatgaaactcaaaccctcactttgcaccactaaacaagattgtgatagctacttcaaacgctctctctttctggtgggggagataggtggatatggttataactatgctgccattgctggaaatgtgactcaacttcaatctactgttcctccagtcgttgaagcaataacaatggccatcaatggattgatagctgaaggagcaagggagctgttggtgccgtggaattttccaattggatgctctgcgctttacctaacttta

SEQ ID NO: 50234 - DNA, 468 bp, Glycine max
  Clone ID: LIB3167-037-P1-K1-C6
aatttcgggccaggcctgacgcccacgcgtcacgttttatctctctcccgaagataaggcagataagagaaggagagaggctcgtgcctggggagaaaagaggagacgagtaatacatggtgaagcagggtctaaacacggtggagcaacaatctgtggcaccgacagcatccaagtttccgttgagcttttgggaagccacggtggcttcaacggtggcgctggtttttgcggtgggtcttctcggcgtgtacctcaccatgcccgattccgattacagcttccttaaactccctcgtaccctcgaagaccttcaactcctacgagatgaccttgagagctatacaagtgactacactgcacaagtcttggtggggtactgcgtggtttatattttcatgcagactttaatgattccagggactgtgttcatgtcattgcttgctggagcactcttttgagtcttta

SEQ ID NO: 50235 - DNA, 305 bp, Glycine max
  Clone ID: LIB3167-037-P1-K1-D10
ttcaggacaaggaaggcatcccaccggaccagcagtggctgatttttgctggcaagcagctcgaggatggaaggaccctcgctgactacaacatccagaaggaatcaacccttcaccttgtcctccgtctccgtggggggttttaagctcgttgtgtaatgttggatgtgttcccaaaacatttgaagaactttgatgtttaatgggtctgtaataatgtcccttgaaaataagttcggtttgtgttgaactcaattgtgtcccattaataatagtactctaatatcccacctacgtttgttatg

SEQ ID NO: 50236 - DNA, 152 bp, Glycine max
  unsure at all n locations
  Clone ID: LIB3167-037-P1-K1-D11
gttcgtatatgagttcaactttaaaggggaaggagcccatcnatggggcatttgtaatggacaagaagcaataaacttaacctatatagtctggcttgtttatttaaaaaaaaaataaaaataaaaaatttatattaaataaaaaatatata

SEQ ID NO: 50237 - DNA, 462 bp, Glycine max
  Clone ID: LIB3167-037-P1-K1-D12
agcgtttttcattgtgcattattcaatggccaccacagcagctctatccggaaccatggtgagcacctccttcatgaggaagcaacctatgacgaccaagagcctaaagacattccccaacgctctttttggtctgaaaggtggacgaggtggtcgtgtaacttgcatggcctcgtacaaggtgaagctcataaccccagaaggagaagtggagtttgaatgcccagatgatgttttcattgttgacaaggctgaggaagaaggcattgaacttccctactcgtgcagggctggttcttgcgtttcatgtgttgggaaaattgtgaaaggtgacgtggaccagtcagatgggtagcttccttgatgatgaacaaatagaaagtggatgggttctcacctgtgttgctctacctaggtcagacgttgtcattgagacacacaaggatggagagatcgaatgat

SEQ ID NO: 50238 - DNA, 94 bp, Glycine max
  Clone ID: LIB3167-037-P1-K1-D5
acgtcacgcatgctagatatccagaccccccattttttggtttttttcacatgcaagcagctcggggatttaaggaccctcgctgactacaaca

SEQ ID NO: 50239 - DNA, 421 bp, Glycine max
  Clone ID: LIB3167-037-P1-K1-D6
gcgcaacaacacaaggccatcatcatggcagctgcttctcctatggcaagccaactcaagtccaccttcacgggaactcttgtagctgcgaagggcctctctgcctcttcaccactccaccttctgccttctaagaggcaatttagcttcactgttagggccatccaatcagaaaagccaacctatcaagtgattcaaccaatcaacggtgatcccttcattggaagccttgaaaccccagttacattcagccccttgattgcatggtacttatcgaacctccccgcatacaggaccgcagtgagcccactactaagagggatcgaggtgggcctggcccatggctaccttctggtgggcccattcgtgaaaggccggcctctgaggaacaccgagatcgccgggcaagcgggctctctcg

SEQ ID NO: 50240 - DNA, 442 bp, Glycine max
  Clone ID: LIB3167-037-P1-K1-E10
ttcgtcccagatcccggtggccttttccctctctttctctggaaaattcccccgattttctcgagaaagtgaaacggaattatgagctttcaggacatcgaggctgggcggcccttcggttcgaggcgcgggttgatgaacgggaagcaagacccgacgcaagcggtggctgccggaatattccagatcaacaccgtcgtctccaccttccagagactcgtcaacaccctcggaacccccaaagacacccccgacctccgcgaaaaactccacaagacaagactacatattgggcaattggtgaaagatacatcagctaaacttaagcaagccagtgacattgatcaccatgctgaagttaatgcaagcaagaagattgcagatgctaaacttgcgaaagattttcaggcagtgttgaaagagtttcagaaggcacaacgtc

SEQ ID NO: 50241 - DNA, 459 bp, Glycine max
  Clone ID: LIB3167-037-P1-K1-E11
gaagccctaattttttgcagatctggaaatggcgtttgcaacataccctccaccgccaccttattacaggctttacaaagattacttgcaagaccctaattctgctcccgaccctccaccacctattgaaggcacttatctttgttttggagccaattacactactagtgatgttctacctaccttggaagaacaaggggtgcgccagctctattctaagggccctaatgttgatttcaagaaagagctgaggtcactcaacggagagttgcaactacatgttttggagcttgctgatattcttattgagaggccttcacagtatgcaagaagagtagaagaaatttcaactgtattcaaaaacttacatcaccttttaaattcattgcgtcctcatcaggcgagagcaacattgattcatattttggaacttcagatacagcgtcgtaaacaagcagt

SEQ ID NO: 50242 - DNA, 457 bp, Glycine max
  unsure at all n locations
  Clone ID: LIB3167-037-P1-K1-E12
gtgttatgctccagggaattacactgttggttgttgatgcatactctgtctttataaaatgtgtacccctccaacgaagactcataatgatcgtctttctgggagacatgattttgtcatatctctcattagctgcagcgtgttcaacagccagtgtcacagatctcctgctcgatgccgatcgatcctattgcctgccaaagttgtgtggtagatatcaattatctgctgctatggccttcttgtcttggtttctttcatcagcatcctgtctgtttaacttttggcttttcccttctttgtaaaatctatctttctgctagctgttgatatgtacaccaatgataagggtgcaaatgacgaagtcatttgttcttgtgcagatattttttttttccacgtgaataaaattatcatgacaacantgtaataagtacttttccaatgcaagagaaat

SEQ ID NO: 50243 - DNA, 433 bp, Glycine max
  Clone ID: LIB3167-037-P1-K1-E5
gcgtccgtccacgcgtccgacatgccaaacgacagggttctgagttttttcttcttcgctaccctcttgagcgatggcttctctctgctacttgccacgatgaccatatttttctaccgagtcaactccatgacgatgactcagtgagttgcactgcaaccgacccaagccttaactacaagccggtgatcggaatcctgacccaccccggcgacggtgcctctggccggctcagcaacgccaccggggtttcttacatcgccgcctcctacgttaaattcgtggagtccggtggtgctagagttattccccttatctacaatgagtcacctgagaaccttaacaagaagctcgatttggtcaatggagtgctcttcactggtgggtgggctgtttctggtccatatttggatactcttggaaacattttaag

SEQ ID NO: 50244 - DNA, 394 bp, Glycine max
  Clone ID: LIB3167-037-P1-K1-F10
aaggctggctaccacacatgggaaaaattaattctcaaggatccacaagatccttccactccgggtgcagtttcatacaaaacagcagcgagagagaaactgataaggcagggatacaacattgttgggatcattggagaccaatggagcgatctcctcggaggccacagaggcgaaagcaggacctttaagcttcctaatcccctgtactacattcagtagttccttcacctctcaacaatctagcttgctcctatctatctatatgtaataagatgcgttcaaataggggcactagcttcactttatgttgtttcagctgtgtgtcaacaagtcatgtaagagacttcactattgttgtttctctttcgtgggtttaataaattatgcgccc

SEQ ID NO: 50245 - DNA, 464 bp, Glycine max
  unsure at all n locations
  Clone ID: LIB3167-037-P1-K1-F12
gaaagaatcaagcttagtcaaagtgtctgtgactgtcacacacagtctttaagatctggaagcgcttctcacttgcccacaacaacaattcctctcaatttcaaaattttcagcttcaaaataataaaaccctaagagaggggttgcaagcaaaatgagaagcgcaaagatgtggacggttttgatgtgtctgatggtgagcttcttcgctcgcattgaatcgctgtctgtgacggtgaacgacgtcgagtgcgtctacgagtacgtgctttacgagggcgacaccgtttcggggaactttgttgtcgtcgaccatgatattttctggaactccgatcaccccggcattgatttcacggtgacatctgctgcggggaatactgtccacaatatcaagggaacctctggtgacaagttcagttntaaagccccaacacatgngatgtataaattttgttttcata

SEQ ID NO: 50246 - DNA, 464 bp, Glycine max
  unsure at all n locations
  Clone ID: LIB3167-037-P1-K1-F5
cccacgcgtccggagataactagaaacagtgtgatgaaaatgaaggtccttgttttcttcgttgctacaattttggtagcatggcaatgccatgcgtacgatatgttccctctccgaatgaacactggctatggtgcccgtactccggaggtgaaatgcgcaagttggaggcttgctgtggaagcacacaacatctttggctttgagaccattcctgaagagtgcgttgaagcaacaaaggaatacatccatggcgaacaatatagatcagactccaaaacagttaaccaacaagcttacttttatgccagagacctcgaagtccatcccaaggacacatttgtgttcagtatagatggcaccgtactctctaatattccatactacaaaaaacatggatatggggtggagaaatttaactcgacctngtatgatgaatgggttaacatgggcaatgcacccgc

SEQ ID NO: 50247 - DNA, 335 bp, Glycine max
  Clone ID: LIB3167-037-P1-K1-F6
gcgcatagcagcgatgggaatcgatcttaaggctgggggtaagtagcaaaagaccaaaagaacagcaccaagatccaatgacatctacctcaaattacttgtcaagctttatcggttccttgttcgaaggactggcagcaatttcaatgctgttatactcaagcgcttgttcatgagcaaggttaacaagcctccaatttctttgtcaaggttaattaagtatacaaagggggaggaggataaaattgctgtaatagtggggactgttactgatgatatcagagtatatgaaagttccagcattgaaaaattacaagcacttcaagttttactga

SEQ ID NO: 50248 - DNA, 443 bp, Glycine max
  unsure at all n locations
  Clone ID: LIB3167-037-P1-K1-G10
cagagacatagcctctttctttcgttttgagaaacaaacccctcgtttcaatcattgatccttgtctgttagataccagttactcttccaatttcgtcatggccaaaacctccttcaagcttcagcatcctttggagagaaggcaggctgaagcttctcgcattagagagaaatatcctgatagaatacctgtgattgtggagaaagctgaaagaagtgacattccagacattgataagaaaaaataccttgtccctgctgatttgactgttggccagtttgtttatgttgttcgcaaaaggattaagctcagtgcagagaaggctatttttgttttcatcaacaacactctacctccaactgctgcatngatgtctgctatttatgaggaaaataaggatcaagatggctttctttacatgacttacagtggagagaacacc

SEQ ID NO: 50249 - DNA, 465 bp, Glycine max
  Clone ID: LIB3167-037-P1-K1-G11
tttgttgcattatcacaaacacctcgtccctcacaatgcagctagcaatggcggccaacgctgtcgtttcaccgtcgccgttccgacctcagccctttctccggtcatccttctccggcgtctccgtcaagctcactccccaatccataacgctttcacgctccaagcccctcaccgtcttcgccgccaccaagaaggccgtcgccgtcctcaaggggacctccgccgtcgaaggcgtcgccactctcatccaagaagacgatggcccgacgacagtttctgttcgcatcactggccttactccggggcttcatggttttcacctacatgagtatggtgatacgacaaatgggtgtatttctacgggagcacattttaatcctaataaatggacacatggtgctcctgaggatgaagtccgtcatgcgggtgacctgggaaacatagttgctaatgcagaggggg

SEQ ID NO: 50250 - DNA, 453 bp, Glycine max
  unsure at all n locations
  Clone ID: LIB3167-037-P1-K1-G4
cccacgcgtccgggaaatatctctcacgagtttgtttaaggagagaagcggacatgaagaagcaattggcatcaaggcgtttgctgatgtgggttatggtacatttgagcatttcaggagtgttgtccaagtccaaccacaccacaactacaacttctctgctgtgcgatggctccgtagaggactgcctcaacgttcaccacttggactcacagcttcccaccatctccagcacccacttccgcagaatcctcgctggagaaaaatgctgcagaggtaacactcagactgcaggtacaggtgatcccaataatcccaacttctgttcgaccgcaaccggttatcgtaagtgtggggccgcaactgatcctggtcaacccaaccgatgtgctgatccaaatgccttccacaggggttgccatatntaagctatttatgtattatttctaatgc

SEQ ID NO: 50251 - DNA, 115 bp, Glycine max
  Clone ID: LIB3167-037-P1-K1-G5
tcgctcccctcgcgcgtgagctctcctcctccctccgctcgcgcccgctcgcgcgccgtcttggcttcgccgcagcggacccgctgctcgcggcgaatgtcgcagcgcgcgtcgc

SEQ ID NO: 50252 - DNA, 371 bp, Glycine max
  Clone ID: LIB3167-037-P1-K1-H10
tcgcccacgtcgtccggagaatggcaactatgactggtgtgagcctttcatgccccagggtggtcttgaacgcatcagcctcaccgcaaaacgcgcatgctgtaaagttctcacttccacccagccaagcagtgcgaccgggtagtatcaagttgggtcgcgtgatgaggatccgacccgttcgcgctgcgcctgagcgcatatcggagaaggtggaggagagcataaagaacgcgcaggaggcgtgcgccggcgatccgacgagcggcgagtgcgtggcggcgtgggacgaggtggaggagctgagcgcggcggcgagccacgccagggacaagcaaaaggaaaaggacttcgacccgctcgagaattac

SEQ ID NO: 50253 - DNA, 432 bp, Glycine max
  Clone ID: LIB3167-037-P1-K1-H11
gcaggatagtgtttagttggtcatctgtggatggcatattgcattccaaactcaccatcactgcagggttggaagacaggtgcatgttgtttattcggctgggacataggcaagaatagaaggaacggcaaacctcagattaagtaccatgatattgatcttacattcccaacttatctggtcgacaaaacatttttgagagggaaggagctcaaatgctgctatagggctacaattgatggattcagtgcaaccaatttccacgaatgttgcgacttcaagggcccatgtgtgataatcagctatacatacaagtctttcaagtttggtgcatttaaccctgaagggtatagaagcacagatgactactacgacacatttgatgccttactattttactggatagacaatgaaactactaaacccatcatg

SEQ ID NO: 50254 - DNA, 464 bp, Glycine max
  Clone ID: LIB3167-037-P1-K1-H12
gcgtacgcttctcttgcaaccttagctgctgttcaaccagcttcgctcaatggccttgctggaagttccgtctctggaactaagctctctttcaagccctctcgccacactgtcaaatccaagaacttcaggagtggtgccgtggtagcaaagtatggtgacaagagtgtgtactttgatttggaggatctgggcaacactacggggcagtgggacttgtatggctcagatgcaccttcaccctacaaccctcttcagagcaagttcttcgagacatttgctgctccattcacaaagaggggattgttactcaagtttctgatattgggaggtggttccacccttgcatacttcagtgcaacagcctcaggtgacattctaccaatcaagaagggaccacaacttccaccaaagcttggtcctcgcggcaagatctaatttgatttgtatcagagctccatcta

SEQ ID NO: 50255 - DNA, 421 bp, Glycine max
  Clone ID: LIB3167-037-P1-K1-H3
ctatatagtcgtatcagttatagatatatccaacacgtttctccgatggcctattcagggaggggagcgcagtattcgggaccttgtcttcactccttgcttcggcatcaacaccattgtacaagtgaatgacctcaaaaactcccctggccctgctaaacgtgagcttcgccttgccaccaaacaagctttgcagctgcttcaggacaactataccgaatttgttggcaaacagagatgtatcaacgggccatggtggtatattgctttctataccatgatcaatcccttcttgactttgaggaccaaaagcaaatctgtctttgctggaccatccaagtccctcgatactcttttcaagtatatttcttctgagcaagtgcccgttcagtatggtggcctcagtgtagatttctgggac

SEQ ID NO: 50256 - DNA, 417 bp, Glycine max
  Clone ID: LIB3167-037-P1-K1-H4
atcttgttgaacggtggttactgttataggctaaggctaagccccttcaccgccactaacaagcttggtctgcttccactaatggctgctttctctgtgaccgccaccacttcaccttcttcatgccttcttcaacgacatcgtttctccaccccttctttctatctacatggctcaccacggccacaaaataagaaaattgggattttcggaccattttccttcaatttgaggaggagaactttaatgtgtgcagtcaatcaagatgcaatggaagcgatgaaagacactggtgaaactgatagcctcataggtgtgctcggagaaacagattcacaccaagatggaagtagaactattcccaaggtgcggaatgaaagtattgaagcatggtcacaatttgctaaaagagcatct

SEQ ID NO: 50257 - DNA, 463 bp, Glycine max
  Clone ID: LIB3167-037-P1-K1-H8
gcgtccgctctctaatagtaacagttatagtaatatacataacataaccaatggaagcacgtgcaggagccaatcaacgtattgcaagaatctctgctcatcttcagccttcaaatttacaggaagggagtgatgttcttcttaagagaggtgagtgcagagcaaaaggtggggcacctggattcaaagttgcaattttgggggctgctggaggaattggtcaatccctttctttgctgatgaagatgaacccattggtttcagttcttcatctttatgatgttgtcaacacccctggtgtcacagctgatgttagccacatggacactggtgctgtggttcgtggctttctggggcagcaacaacttgagagtgcactcactggcatggacttggtaatcatacctgctggggtgccaaggaaacctgtgatgacaagagatgatttatttaaaataaatgc

SEQ ID NO: 50258 - DNA, 364 bp, Glycine max
  Clone ID: LIB3167-037-P1-K1-H9
gaacttgcagctggccaacactgaagagtacattgtgggacagtttactggaaatttgggagagattttaatcagatgtaacaatgttctctaccttcgaggagtaccggaggatgaggaaatcgaagatgttgcagaagactagatagtgataaaagctgctaatggctatgacataaaatgaactcgaattttctactgtttttgtatcttaacttaaatgtaggtttttttgtagttgagtagagatttgaaatgatgcactcgcttgtgtatagggtgcctatgttcaagttgtctgttattttattttcatgcttctgaatatgttatttctctgtttatgtaataatcaatatcattt

SEQ ID NO: 50259 - DNA, 322 bp, Glycine max
  Clone ID: LIB3167-038-P1-K1-A1
gcggtggtacctttcttgcgaaacagaagggcgaaggggcaaacacaacttttttgtttttttgtagagcgagagagaaaaaaatgttggggatcttcagcagttccgtggtgtcgccgccggaggagctggtggctgccggcagcagaacgccgtcgccgaagacgacggcggggaagctgctgaaccggttcgtggagaacaaggcgtccgcggtgtctctgcaggtgggagaacacgtgcagttggcttacacgcaccacaacgagtcaccggggcatcccagatcaatttgctgttaaggatggagaaattcttgctt

SEQ ID NO: 50260 - DNA, 415 bp, Glycine max
  unsure at all n locations
  Clone ID: LIB3167-038-P1-K1-A11
cagacagataactgagcgcttcgcaaaataaccagtgctctcttttgtctctctcattttcaactctcaacaatgccgccggcgaagcgcaaagcggagggaactgctgcagctgccgcttcttctgcggcggctccgatgagagtcactcgtgctgcggcgaagcgcgccgccgcgagctccgaccctccgccggtgccggtggttaagaaggcggcgaagaaggccaaagttgctgctgctgctaagaagcagaaaaggaacgaaaaggaaaatgaagatgttccggttgagagcgagaacaaagcggaagaaaaagaagaaggaggagacgccttcgagaagaacgttctagacgcttncaacaagaccatcgtcgtcgaacactgcaagcaatgtaactccttcaagacca

SEQ ID NO: 50261 - DNA, 354 bp, Glycine max
  unsure at all n locations
  Clone ID: LIB3167-038-P1-K1-A12
gnnggaagctnnccagnnnnncaaccacaccgaggggcgncngggcactaannnagaggacagagcgaaaccgnagccanaagcaaaacacaagacaanacagancgaaannnncagacnccacacncccnnnanncnncaccnccaaggggccggaaaggaancgaaancgggaacgaaannccgaggacgccncggggaaaanagcgaaaaaaaaggggggaaaggaggnanannnannaannnagnngggnanannnaacaanggccncgaccnaanccaaaaaaaaaaaacccncnccgaaanncagcnnncccaaacgaaaacganaaccgaacaccgacgnggaaaac

SEQ ID NO: 50262 - DNA, 59 bp, Glycine max
  unsure at all n locations
  Clone ID: LIB3167-038-P1-K1-A2
cggaggaggagccggagcacgagnncacggacaaaaggagcgagagggacaggaacgcg

SEQ ID NO: 50263 - DNA, 423 bp, Glycine max
  Clone ID: LIB3167-038-P1-K1-A4
gaaaccgacccagttgtgctattgccgctgtcccgtgcaattcgaagggaatgaagaacaagggtttagaattagggtcttaaaacaactcaaccaactttgtgggtaaaattagggattcaggtgtaaagtgaaaaactagggttttggtaaatctccaaaatgtcgacgggcaaacccagaggcggtgattttcagatggtcccggcgccgggaacgtcaaagccttcccttccgccggcagcagcatcgaatgcgatagtggaatatactccggtctctctcaaagaggaagaggaggatctggaagtcaagctccgacggattatcgacaatgttcctgtccgtgttagcaatacttccggtagttccgccggttcaggctccggcgactttcaccagtatcggcaaatgagacgcaag

SEQ ID NO: 50264 - DNA, 380 bp, Glycine max
  unsure at all n locations
  Clone ID: LIB3167-038-P1-K1-A5
cacgcgtncgcattcgtaagacgactatctaatgttatggttggccctataatataaatgggggaaaaaaaaaaaaaaaaaaaaaagggaaaaaaaaaaaaaaaaaaaaaaaaaaaaaaaaaaaaaaaaaaaaaaaaaaaaaaaaaaaaaaaaaaaaaaaaaaaaaaaaaaaaaaaaaaaaaaaaaaagggggggggcccttaaagagaacccaagttaccccccccgggaaggcaaaaaaaaagttttttttgggggcccccaaaaacaaaaaacacgggccggggtttaaaaacggggggaggggaaaaacccgggggaacccaaaaaaaaacccctgaaaaaaaacccccttttcaccggggggggaaaaaaagaaa

SEQ ID NO: 50265 - DNA, 391 bp, Glycine max
  Clone ID: LIB3167-038-P1-K1-A6
ccacccgtccgcccacgcgtccggcttgttgaaggtcttaagcggttggccaagtcagatcctatggttgtttgtgccattgaggagtctggtgaacacattgttgctggtgcaggagagcttcatcttgagatctgtttgaaggacttgcaggatgatttcatgggtggagctgagatcattaaatctgaccctgttgtgtcattcagggagactgtcctggagagatcatgccgtactgtgatgagcaaattacccaacaagcacaatcgtctgtacatggaagcaagaccattggaggaaggtcttgccgtggccattgactgattgcatgattttaccaagggatgaccccaagattcgcttcaagattcttgtagaaagagttttg

SEQ ID NO: 50266 - DNA, 209 bp, Glycine max
  unsure at all n locations
  Clone ID: LIB3167-038-P1-K1-A9
ggaganngnccannnccccaaaggggccgcgnaaccccggaggagaagaaaannccnnacaaaccccaccncancgancncagnaacaaacccgaacggnnnnngggngngaaacccgaagggaaggngccagnggnncnnnnnganggcaaaagggcggcngannccgacgnaancgngggganaccagaggaaaagnacccagaacc

SEQ ID NO: 50267 - DNA, 327 bp, Glycine max
  unsure at all n locations
  Clone ID: LIB3167-038-P1-K1-B1
accgggatataatggagattagacactgcctttccggaaatttaggacaccaacagtggaggttaagcaggtttccttgagaagaaatgcttttctggacatttacccttttttcttttattttctggtatctttatattctcttattatgatagggtggatccctctgaagtgggattatttatcgggggactctgtgatagttagtctcagaaatcggtaaacaaataccggttacagtggatggtcatgtattattaagtgtaggaattggtaacgaataattattttattaatgaaacatgtattttttttaaaaaanaanaa

SEQ ID NO: 50268 - DNA, 162 bp, Glycine max
  unsure at all n locations
  Clone ID: LIB3167-038-P1-K1-B10
cccacgcgnccgcgaacagagcngncngnnngangggaagncacgaanaccccacgnaaggacganannnangggcagcacacgaccnagnanagngcagnncggnacccgngnncnngacccggnnccnngcnnccacaaaannanaaccganaaaanccc

SEQ ID NO: 50269 - DNA, 332 bp, Glycine max
  unsure at all n locations
  Clone ID: LIB3167-038-P1-K1-B11
cnaannncaaanggaaanngcncncncaaaacagagggcaagaggaggaagaacaagnanagaaaaaccanancnacanagnnagancncncncncgagaaaacaaacgnagaganacggaacggaggaagggcnacncggangnganannggngcccncgggannncnaacaagcanngggnaccannncnggcnanggcacaaggnncgaacncagccacacacaaccancannggcancaangcnaggggcccgagaaanngggnnaaaggcangangaaggacaangacaagaaaaacanncnggcngnncaancacnaaggaacaca

SEQ ID NO: 50270 - DNA, 233 bp, Glycine max
  unsure at all n locations
  Clone ID: LIB3167-038-P1-K1-B2
ccacaagattacaggcatatggatggntttggagttaacacatatacgctgatcaacaaggctgggaaagcagtgtatgtgaaatttcactggaagaccactagtggtataaagtgtctattggaggaagaggccattaaggtgggaggagccaaccacagccatgccactcaagacctccatgattcaattgctgctggtaactatcctgagtggaaactgtttgttcagac

SEQ ID NO: 50271 - DNA, 362 bp, Glycine max
  unsure at all n locations
  Clone ID: LIB3167-038-P1-K1-B3
gacgcgngggctaatgctacaagaaccataagtttcttgaaaaatgatggaactttgacgggattggccattgagttaagtaagcgacatcctcagggtgaagcatatggtcctgttagtgaagtctacgtgccttcgagtgaaggagttgaagcttacatttggttactggcaaaggctgacgttgttgagaatgatgcttgctaccatcaaatcattagccattggctaaacactcatgcggttgtggagccattcgccatagcgacaaacaggcatctgagcgtggttcaacctatttacaaacttctgtttcctcactatcgggacaccatgaacattaaatcacttgcccgcaaatc

SEQ ID NO: 50272 - DNA, 349 bp, Glycine max
  unsure at all n locations
  Clone ID: LIB3167-038-P1-K1-B4
accggaccgatgatatcggtcgacaccacccgnccggaacgtacaatctttattttcccctgaaaattgaatggcatgtgattctttctatttaactcgtgtttgaatgcatccttgtagcaaacctttccttgatgttacatccaaaattgtgagcnnanaaaaaaaaaaaaaaaaaaaaaaaaaaaaaaaaaaaaaaaaaaaaaaaaaaaaaaaaaaaaaaaaaaaaaaaaaaaaaaaaaaaaaaaaaaaaaaaaaaaaaaaaaaaaaaaaaaaaaaanggggggggccgtttaaaaggatcaaagtttacttccccgggcttgcaaagataaaatttttttttggg

SEQ ID NO: 50273 - DNA, 389 bp, Glycine max
  unsure at all n locations
  Clone ID: LIB3167-038-P1-K1-B5
aaaannncacaaacatactctcacaaccctagnacctnnnaatnngnngancgcgaacctagctaatcaactacctacacttcttggatgatttttagaaggcactgcgttttgcatggctggtgatgcagcatttccctcttacacttccacttgcatgatgaccttcttcttctctttgctcttagctcttcacttcgccatggccgtcccagaacgaagcttctcctctttagcttctataaaagaaggtgcaaagaagaggaacaccatggtagctgcttcaactgctagagaagaaggaagcacacaaaatcttaagacagaagaagccacaccaaaagataaccatgtttctgatcatctcttgaagggtactaaataagaag

SEQ ID NO: 50274 - DNA, 120 bp, Glycine max
  unsure at all n locations
  Clone ID: LIB3167-038-P1-K1-B7
caaaaccaccagagaaaacgcgnngaggcnccagcggcagggangcaagcacgncncgcagggcgcnancaagaggngcaagcaggnngagancggnggngacaagaagggaaaaggaac

SEQ ID NO: 50275 - DNA, 321 bp, Glycine max
  unsure at all n locations
  Clone ID: LIB3167-038-P1-K1-B8
agnngcgncgngaaagaancgcagaaagaangaaggcggggcaggaannagnncccagcagcgggaagacggacagagcggcgangcccgangaaanngnngaccangngaagnnccnaaggcnccaggnnaagggcccgagcangagnagaccgggaggagcnggngcagnngcncagcnngnngcngangnnccccnnncngcagnggagggggaccaggacanagaaggggnanccaangagcaagccngggacaaggggnccaanganggcacagaacaacagggggcnaagcnaaaggaagaagannggggagcag

SEQ ID NO: 50276 - DNA, 316 bp, Glycine max
  unsure at all n locations
  Clone ID: LIB3167-038-P1-K1-C1
ccgctcagngngctactcagngcttgccaaaaaactggtccttctggtttccaatgtgcataggctgccatcatgttaggttcattccatcacttgtgtcctcaaattattttgttttagttcttctttgttctatgtgtgacatgtttcattttaataataaggtaaacatatgtttgccttagttagtagtaacattttctcttttctagtaaatttggggaacttagattattattattgtgatttttacttttggggtatattcgaggtggaaggagttgagttgagaaagagaggtagttccttaagggat

SEQ ID NO: 50277 - DNA, 327 bp, Glycine max
  unsure at all n locations
  Clone ID: LIB3167-038-P1-K1-C11
cccacgcgnccgcagcancagnggcnacagcccgcaggcnncacggngcaagcagccggcccgcaaccgcccgcaaanccccnggcccccccggaaccgnccgcanncccggcgacaaggcgaacncccaccggnccnncangnncggcggncncgcgagcggngaaacgcgcancaccggcccccnggaaggcgaggacgncancaanacgggcaaggccangcaggccangggcgccagganccgnaaggaaggcgacacccggancancganggcgncggcaanggcggccccccggcgccggaggcgccgcncgannncggca

SEQ ID NO: 50278 - DNA, 177 bp, Glycine max
  unsure at all n locations
  Clone ID: LIB3167-038-P1-K1-C12
cccacgcgnccgcaaagggggaggngcannncnctctgctnngcaancaaacnncagcgagggaggacgacnncnnnnataacgacacaacacaaannnncacgnnacnngaggggacnncncacgaccaannangngganccaccacaaccaggancaaacnngcanagcancccc

SEQ ID NO: 50279 - DNA, 68 bp, Glycine max
  unsure at all n locations
  Clone ID: LIB3167-038-P1-K1-C2
aacactaggcactcnctanncccaaacatcgcagaagaaganggaggcncaccccgacgncccacgcg

SEQ ID NO: 50280 - DNA, 439 bp, Glycine max
  Clone ID: LIB3167-038-P1-K1-C4
cggacgcgtgggttttgagtgccacagagttctgagtttcataggagaaaaaaaaatgacagaagaacaaaccaaaacggttgagtcagaatcagtaacaccaccacctgctgctgctgctccttcacaggttcctcctgctgctgaggctgaacatgttcctgaggctccaaaggatgtgactgaggagaaatctgtaattccagtgccttcttctgatgacaagcctgatgaatccaaggctcttgtcttggttgagaagactcaagaagttgctgaagtgaaaccaactgagggctctatcaaccgagatgcggtgcttgcaagagttgcaactgaggagaggttgtcattaatcaaagcatgggaagaaagtgaaaaatcaaaagctgaaaacaaggctcacaaaaagctttcatcagtttctgcatgggaaaac

SEQ ID NO: 50281 - DNA, 435 bp, Glycine max
  unsure at all n locations
  Clone ID: LIB3167-038-P1-K1-C6
cccacccgnccggnggaagagaagaagaagccttcagcacttgaagttgaaaccttgctgatcctcatcatgggaaccatttttcctcctcactctctctccactcctcaacatcaaaccttcaccctcaagaattctcttggctccctctccccaacccaagtcaaattctctcttttgctccaaacccattgtttcaagtctcagaaagaaccaaacttcatctcccaaaccttcatcgggcacaagctggttggctcatgctcaacagggcctagcagctttggctatctccttggcactcaactttagcccagttttgtttaatggcaatgcattggcatctgagtttgatgtgcttaatgagggtccacccaaagattcttatgtgtttgatgatgcaggagtgcttagtagggtgaccaggtctgattt

SEQ ID NO: 50282 - DNA, 307 bp, Glycine max
  unsure at all n locations
  Clone ID: LIB3167-038-P1-K1-C7
nccacgcgnccgngagcaaacannnnngccnggaagggacgccanngaaanggcagcagcgggggacaagaaangggnnnncacggaccaagcannaccagcngancnngncaagagaggannggcagnngaggancccncngccccacaagggcnncgccnngnganagaggacnacccnnangcngnnganggacnngaaanangggangcnannaagacangggnccangagnangncncngngganaacccaacaaangcagcaanncaacaagacacngaacnncaagcanggnggaaggaa

SEQ ID NO: 50283 - DNA, 385 bp, Glycine max
  unsure at all n locations
  Clone ID: LIB3167-038-P1-K1-C8
nccacgcgnccgcngagaaggcancnagaacaaagggcggaanccgannnngaaaaccggagcgcgnaaaangaacggnaccccgcccncanaaanaaaancnacnacnaaacgcncnncncnnccgcaancaaaaagcaaaccaaacacaacacaaggagaagaaccagancncncnnncncaaancaccaagaanagnngaaaanggggcngncnnncacgaagcngnncagccggcncnnngcgaagaaggagangcgnanncnnanggngggncncgacgccgccggnaagaccaccanncncnacaaacncaagcnaggagagancgncacaaccanncccaccanngggnnnaangnngaaaccgnggaanacaagaac

SEQ ID NO: 50284 - DNA, 270 bp, Glycine max
  Clone ID: LIB3167-038-P1-K1-D1
cgcacgctcgcacgcgtcgcacctcgtttagacgagcggcgacacgcgtcgggaaggtgagaaggagaattgatagaggagtaaagcagaggtaaagctttgacaggagtgcaggataacagaaaaaagaggtgtcaaacatagcgtgagtaaggcctccctagaaatggatgaaattgaggaatttttattgagtggatggagtgttaagaggcgtatgtttttccggtgctgaatttaggcgttattacaaaaaaattcttagtgtga

SEQ ID NO: 50285 - DNA, 142 bp, Glycine max
  unsure at all n locations
  Clone ID: LIB3167-038-P1-K1-D10
gaggaaacaggagccaaacccnncnggcccccgcnannggaggcaaagnnggcgccgcngnnaccgcnaancccagaagacccaacgcnggagccgccgcngcaccaaagaagncanggcnccccggcgcaagaggcggcgg

SEQ ID NO: 50286 - DNA, 242 bp, Glycine max
  unsure at all n locations
  Clone ID: LIB3167-038-P1-K1-D11
ggcnggnncaacngaggnganggcnnngaannngccnncncccgcccaagngaagcccnnagggnncncnncaaanaaccccacaaaacnnccagggagcnnnncnnngaagagaaaaganagngacacaacagnagagagacgagggganngcncngccgcngcncaancaccaccaccagcanggccaggaacagcnanncccgagccccccgannncaagacangggangggcaaaaac

SEQ ID NO: 50287 - DNA, 272 bp, Glycine max
  Clone ID: LIB3167-038-P1-K1-D12
aaactagggagcgacaagcactgggaggggaaagagcgatgggaggcatatggcatgggaaccgttggcgctaaaagcctacacgcgttaactacagggggggaagacttgaagaacccacagatggtagtaagggcctaggtgggaagacgcccggcttaataaagggaaagaaggactgacccgacagtgcgatgaaagaatgaaaggagggcgacgaccgcttggataaaaaccagttgtgaaggaaccaaaaaataatgcatcagcag

SEQ ID NO: 50288 - DNA, 409 bp, Glycine max
  unsure at all n locations
  Clone ID: LIB3167-038-P1-K1-D2
tttcgctccgttctccgtttcaggtggatctcatgagctgtggttaacaaagcgagttggacctaagctcactgttcaaaggagatcaaaccttgtgatcaagaggaaccacacttcttcaattagtgcagaataccgtgataatagaggaggtggaggtggggattttgntgctggctttcttctgggtggtgcagtttttggaactctagcttatatctttgctccccagaagatctctgctaaacgaagatgagtatgggtttcgcaaggccaaaagaccaatatattacgatgaagggttagagaggaccaggcagaccttgaatgagaagataggccaactaaactctgccattgataatggatcttcccgtttgagaggtggcaacaacgtacctgctgcaaa

SEQ ID NO: 50289 - DNA, 425 bp, Glycine max
  unsure at all n locations
  Clone ID: LIB3167-038-P1-K1-D3
ggncatgcatatgcaagcacccacaatcagncttaacactgcaagggccccatcttcattagctggagctgccaatgctggcctgcgaccacacctcaaccctttggctttaaagtcatctttcttctctggttcccttaacctcttacttcatccaatgcaacagtatcttacttctggagctcccaggatttccatgcgtgtggcctccaagcaagcctatatctgtcgtgattgcgggtatatttacaacgacaggatcccctttgagaaattgcctgataaattcttctgtcctgtttgtggtgctccaaaacgaaggtttaggccctacgctccaactgttgcaagaaatgcaaatgataaagatgttagaaaggcacgaaaatccgaaatcaagaaagaagaagcaattgggaacgcac

SEQ ID NO: 50290 - DNA, 400 bp, Glycine max
  unsure at all n locations
  Clone ID: LIB3167-038-P1-K1-D5
cacgcgnncgcagacctagggattncggccgnttgctccccaaaaaggaaagaagcagattgtgtcctttgaaatcaacaagaaaagatgtcaggtgaagaggtagctgttgcagttgaggtacctgctacttcaattccaggtgagccaatggacatcatgactgctctacagcttgtgctgagaaaatctctggcctatggtggtcttgcacgaggtcttcatgaaggtgccaaggtgatcgagaagcatgctgcacagctctgtgttctagcagaagattgtgaccaacctgattatgtgaaactggtgaaggctctttgtgcagagcacaatgttagtcttttgacagttccaagtgcaaagacccttggagaaaggggctgtttgtgtaagattg

SEQ ID NO: 50291 - DNA, 362 bp, Glycine max
  unsure at all n locations
  Clone ID: LIB3167-038-P1-K1-D6
accgcgagcgagaagcaaanggcnnncncaangancncnnccccagcngnnaccacgggcaaccgngccggngccggcacgggggcnccanncacnggccncaagnccanggcnggcnnccccaccagaaagaccaacaangacannaccnccanngcnagcaacggnggaagagngcaangcangcaggngnggccaccagnnggcaagaagaagnnggagacncnnnccnaccngccagaccnngangangcacaannggcaaaggaaggagaanaccnncnnaggaagggacggannccncgcngggaanncgagncggagcacggnnncggggaccgngagcacaacaggncaccagg

SEQ ID NO: 50292 - DNA, 324 bp, Glycine max
  unsure at all n locations
  Clone ID: LIB3167-038-P1-K1-D8
aaccagnnnaagcangaaaggccccnncagngacggcagcngnggcccncaaaccngccccgggcacngnngagaagnccncagnnagaggccnncccncccncncaaggaaccccncnncanncagaggggnggccagnggnggcaagaagancaagacngacaagcccnanggaannaanggnggcanggcnnngagggaaggagnngangcanccggcaggaaaggaaagggaaagggcgnnnaccagnnnngagacaaanacggngcnaangncganggnnacaggccnancnacgacaccaaggacnggncnncaaccg

SEQ ID NO: 50293 - DNA, 425 bp, Glycine max
  Clone ID: LIB3167-038-P1-K1-E1
cccacgcgtccgaggggatgcgagacattcaccgaggctcatcatcgccactccagaacttgggcaagcgccgacgaacgcacagaacgctctactacccctacatttcacgcagccccactcccaagcccaagaaagatcaaaagaaaaggttaatctcattcgtctctattggctatgctgaaagaaggtcaacttgttaaatatgatgaacaatggctgcctccattatctactcttgctctagaaacttgttagagagcaagcgtcaccacgaggaagagttgaaactattggaagaagagactgcaagaagactggaagaagcaattcgaaaaaatgttgaggaaaagcttaacacagaggaagtcaagttagaaatagaaaggcgcgtagcaaagggagtgaagaaactgtttgatgat

SEQ ID NO: 50294 - DNA, 326 bp, Glycine max
  unsure at all n locations
  Clone ID: LIB3167-038-P1-K1-E10
cccacgcgnccgcccacgcgnccggcnnaancgggcgaggcaganncnaaaaaanngagggggggngggcnggagcaancggggcngccaagaagaaanncgaggaagaggaaccgccgcgaagcnnccagagcgggggcccggngancggcgngacgggcancgngggcaacagccncgccgagaaccncccncncgccgacacccccgccggnccaaggaaggncaacggcgncgcacgccgcccccngccgccgnggaacgccgaccaaccngncgagaacaaccagggcgacgncnacgaacccgccgacgccgaagccaaa

SEQ ID NO: 50295 - DNA, 115 bp, Glycine max
  unsure at all n locations
  Clone ID: LIB3167-038-P1-K1-E11
cccaaaccncccncannncnncnnnnccccaaccaacaacnccacncnnnngnggncnngggaggcnnnnggcnaaaannncagcnnccagaanngaaaaaaaangaccaaacaa

SEQ ID NO: 50296 - DNA, 282 bp, Glycine max
  unsure at all n locations
  Clone ID: LIB3167-038-P1-K1-E2
gaggagctnnaagaggctaagactgcataccccaacggctncatccgnatcatcggattcgacggcgttcgccaagtgcagtgcatcagcttcatcgcctacaagcccccaggcttctaagtgtgaaaaatttgcaaagcatttgtagccgccaccccactttgtttgtttgtacttaaactacattcccatttgtttttgctttttgagatttcatcatcctgtatttttggtttctgttttcggacttcaatggaaattaatggatgagaactaatgaat

SEQ ID NO: 50297 - DNA, 218 bp, Glycine max
  unsure at all n locations
  Clone ID: LIB3167-038-P1-K1-E3
ccggaccgctgagtcccgtcgacaccacccgtncgcccacgcgtncgcccacgcgtccgcttggctatttcctttgcatgcaactgaaggcaaggaatgaaagagtaacaatcaatgcagtgcatccaggcattgtgaagacaggaattattagagctcataagggcttaataacagattccctattttttatcgcatcaaagttactcaaaacgaca

SEQ ID NO: 50298 - DNA, 380 bp, Glycine max
  unsure at all n locations
  Clone ID: LIB3167-038-P1-K1-E4
cacgcgtccgagaaatataactaatattctttagaataatcaaaaagaatattaaattcaaataaattttagatagaaaaaagacttaaaaaggaggatttgaaatgcgagatctaaaaacatatctttccgtggcaccagtagtaagtactctatggttcggggctttggcgggtctcttgatagagatcaatcgtttttttccagatgcattgatattcccttttttttcattctagttattgacacggaaaggggtgaagaagattatagatccaattaagtattaaatatatgtaattaatatgtaattaatctcctcttctttatttcgncttttatttcttcttttttttacaattgtaatagaataagttagg

SEQ ID NO: 50299 - DNA, 136 bp, Glycine max
  Clone ID: LIB3167-038-P1-K1-E6
aaaaaaaaaaaaaaaaaaaaaaaaaaaaaaaaaaaaaaaaaaaaaaaaaaaaaaaaaaaaaagggagaaaaaaaaaaaagaaaaaaagagagggaaaaaaaaaaaaaaaaaaggaaaaaaaaaaaaaaaaaaaagg

SEQ ID NO: 50300 - DNA, 249 bp, Glycine max
  unsure at all n locations
  Clone ID: LIB3167-038-P1-K1-E9
ggcaaaaaggcancanncaccgggcggcnccanccnnggcagcccagccgcaccaaccggncggcagnagcaacgcaaggagancacncnagngaacgggccaaagccgngaagagaaaaggcagnnangcaangacaggangnagcaacggaaggaggaacccgangnncgccgggcggcggnggggggcggccggcgggggacggagnggcagangagccaaaccaggaaccccagaagccaagaaa

SEQ ID NO: 50301 - DNA, 329 bp, Glycine max
  Clone ID: LIB3167-038-P1-K1-F1
gtccggaagtaacctaaaataattatatttttaataaattttaattattaataaagaatgtgtgaaaaaatatgttagtaatatttgtcaaggaattatcatttaccaatatatggcaatggagccttttcagtttatcaagtacttttattgctgagaaaaaaaagtactttaattgatgtgtttgcgatttcagtgtatcattagtatgtacttactagtagaaaaactgaagatatgctgttgcattgtgttgtagcaattaaataaaaatttcagttcaaagttactttgagttacgaatatatatgaacacttgtttactctcc

SEQ ID NO: 50302 - DNA, 310 bp, Glycine max
  unsure at all n locations
  Clone ID: LIB3167-038-P1-K1-F11
cccacgcgnncgcccacgcgnncgancgaganaacgagaaacagngngangaaaangaaggggcccggggncnncgnggcnacaannnnggnagcanggcaangccangcgnacganangnncccncnccgaaggaacaccggcnanggngcccgnaccccggaggggaaacgcgcaagnnggaggcnngcngnggaagcacacaacancnnnggcnnngagaccanncccgaagagggcgnngaagcaacaaaggaanacanccanggcgaacaananagancagaccccaaaacagnnaaccaacaag

SEQ ID NO: 50303 - DNA, 219 bp, Glycine max
  unsure at all n locations
  Clone ID: LIB3167-038-P1-K1-F12
cggacgcgngggcggacgcgngggcggacgcgngggcgagcangcaaaaaagcnngccncncgggcagancngnnngngaangaggcannnggnacngcncacagggcacangcancaacagagggngnnacnaaanacccgaagccancngnggccggnnnncnnnngcaaaaggaacnngannacccngnnggggcggnancaagccccaaaaggcc

SEQ ID NO: 50304 - DNA, 400 bp, Glycine max
  unsure at all n locations
  Clone ID: LIB3167-038-P1-K1-F3
cacgcgtncgaacagagcaggcgaaaagggcctagaaccctaacgtgccaaaaccctacgcgtggggtcgtcgttaattcacctgcggcgcaccgtaagagcactctccggcgtaacaccagtctttctctgagcatgcggcatcgcattcccgccccattcggtgcggtgtttcatggagtttgcagtcaccgaagggtgtgggtcagccccgttcattgaggataagctcaatggcactgctctcttttcgatcctcgcagcggcagagcaacatccccgatgagattggtcccgataccattctctttgagggctgcgactacaaccactggctcatcgtgatggaattcaaagacaaggacaacaaacccttttccgaagacatggttcgcgttta

SEQ ID NO: 50305 - DNA, 445 bp, Glycine max
  unsure at all n locations
  Clone ID: LIB3167-038-P1-K1-F4
nccacgcgtccggacgtggatatagaacgagatgatggaaacgatcgctatgaaactgcaactacggaaaatgctaagggagcggcagatgaagggaatggtgcgccacttaggcttcccccacgtctggtacctcgactgaatcattagcaggatgtgggtaacgaccaggatgttgatgcacgtggttgttgaagaggtactacttggacgcgtgggcttagagcactaacgttgcgaccgcaataccttcatgggcatgaacgtcaacagcatgggcaagatgctcaagtgcgcccgggatgacgacatcagaaccatgaaggccgacgacgggagcgacacggtcactttgatgtgcgaaagccctacacaagataagatttctgatgttgagatgatgctgatggacattgacagtgagcaccttgggattcagaggcag

SEQ ID NO: 50306 - DNA, 456 bp, Glycine max
  unsure at all n locations
  Clone ID: LIB3167-038-P1-K1-F6
cgaactatcttgctagtgtcggtttagttagcacacatccccacatccaaaggttcatttcaatatggcaatcttgtcaagttttgcaccgttgaccattcttagtatagtcttgttagtagtcggagtcattgtcactggggcgaaagctaggccaagagcattctttgtgtttggagattcacttgttgatagtggaaataacaattacttggctaccacggcacgtgccgatgcccctccttatgggattgattaccctccaagtcatagaccaaccggtcgtttttccaatggctacaacattcctgatcttatcagtcagagacttggtgctgagtctacattgccatacttgagtccagaattaagaggagataagctcttagttggtgccaattttgcttcagctggaattggaatccttaatgacactggaattcagtntgtaaatgt

SEQ ID NO: 50307 - DNA, 326 bp, Glycine max
  unsure at all n locations
  Clone ID: LIB3167-038-P1-K1-F7
gnggngcngagggnncaaagcagagcagaagngagaggaagagccgaaaagcaangnngaagcggggaccgaaacccgnnaccggggnnagnagggncacaancaagagaacaaaaaananncnnnncnncaacncaaaacccgangncnncaagaggccaaanncngagaccnangncanannnggggaggcgaaaanagaggacnngagcncncagnngcagacacaggcngcncaacagnncaggangccagananggganccngaacggcaaaacaagaagaagcngcngcngcagcagcgcaaccngaagaagagggagag

SEQ ID NO: 50308 - DNA, 237 bp, Glycine max
  unsure at all n locations
  Clone ID: LIB3167-038-P1-K1-F8
gaaaaaaaaaaagaaaanaaacaaanaagacggancaaaanacgnanagnagcggggaannacgggacaaaaanaaaanccgcgngggnncagaccngggacaacncaaagncangangcnannnggnnngcncaaccaacaaannannccgagaananacaagaaggaaaaaaaanacgaganngnancaaaaannananacaaaaaanaanaagaananccccngggggggaggg

SEQ ID NO: 50309 - DNA, 271 bp, Glycine max
  unsure at all n locations
  Clone ID: LIB3167-038-P1-K1-F9
aaaagagaaaaaaacaaaaangcngaggggcgcngcnagcgcgaagacaagggggcgaacggggacgnnggaggcgccaccanngggganaagggnncngccnnggcgcaaccacaagagggnggnggaccacgacgaggaccaaggaagacggggggcacccaacggggaggaccacccccgcggaacgaggcgaagcggaacggcagggngnggngacggcangaaaccccagaaaaagggggaagacaaaacggggaagaacgcagaa

SEQ ID NO: 50310 - DNA, 333 bp, Glycine max
  unsure at all n locations
  Clone ID: LIB3167-038-P1-K1-G10
gncatctacaactagnaacaaaganccaacaagcagagcaancncncncncngncncccaagcaaaacagacangggnnngaaggaggannnngagcagnangcngagaaagcaaagaccccgccaccgacncaancaaacgaagacccgcnnanccnnnangganngnacaagcaggccaccgnnggaccngncaacanccagccgccgggaaggggcaacangagggacagagcnaaangggangcanggaaggcngnngaagggaaanccaaggacgaagcaangagggannacancacnaaggggaaacagcngcnggaagcagccggc

SEQ ID NO: 50311 - DNA, 241 bp, Glycine max
  unsure at all n locations
  Clone ID: LIB3167-038-P1-K1-G12
gaggaagancaacangcagagaagcaaccccganggggcacggaggcagaagagacgcccacggacccccgaagaaggnggncncacgcaaagagcagcgagacaggggacggacaagcaagaanacggggcaagaggggaggaacaaggaggggacagaacanaggcacccaccagagcannacagacaaanngccagacgaaagagaccaaaccaaccaacgaagaaggagaaccgagg

SEQ ID NO: 50312 - DNA, 98 bp, Glycine max
  unsure at all n locations
  Clone ID: LIB3167-038-P1-K1-G3
cgggagaagggngncaacggcagagcgnncgggcgnnncagnnacaacncaagggcncacccacgcggaggaggcccacaagcgncgagcgagcgccc

SEQ ID NO: 50313 - DNA, 414 bp, Glycine max
  Clone ID: LIB3167-038-P1-K1-G4
cttctagacaaggcaaggttgcaattcttgatgggcatatccagctgacagaaaacgatgaatgtgcttaccaagagatgctcactcaccttgcactctgttccattccagatccaaagaaggtgctgcttattggagggggagatggtggaattcttagggaaatatcacgccattcttctgttgagcatattgatatatgcgaactagaccaaatggtcattgatgtttattcggagtttttcccggatatagctgttggttacgaggatccccgagtgcatgttcatatcagcgatggagttgcgtttatcaattctgttcctgagggcacttacgatgtcattatatcggatgctttttcagcaatggggcatagtgctgatggtcttgctgatgaatgcttcttagaat

SEQ ID NO: 50314 - DNA, 207 bp, Glycine max
  Clone ID: LIB3167-038-P1-K1-G5
aaaatcaagatatacttaagcgattttttgacaaaagcttggcttggtgtggggctggcttacttaggctgtgagagctggacttgggaaaaccatgcctgcccttttgaagcgcactgggtgctgctctagccatctgatcttacacaacagatgcaattggacacatatcctggcagacgtactgaggaagagggataagggact

SEQ ID NO: 50315 - DNA, 453 bp, Glycine max
  unsure at all n locations
  Clone ID: LIB3167-038-P1-K1-G6
cacgcgnncganatgggggaccctcgancgcaagcaaaaatatnaaacggggnagacgnngcttatggcggggaaaacggattcaaggaagctattgagctatctgctgagattttatcaaatgtgaagttcattcaagagaaacgcttgatagggaaatattttgaagagatcagccaggacactgggaaatatgtctttggggttgaggacactttgaaggcactggagatgggtgctgtggaaacactcattgtatgggaaaatttggatattaataggtatgtgctgaaaaatggtactactagtgagattatcataaaacacttgaacaaggaacaagatgctgatcaaagcaacttccgtgattcagccacctctgcagagttggaagttcaggagaagatgcccttgcttgagtggtttgccaatgagtacaaaaaatttggatgc

SEQ ID NO: 50316 - DNA, 250 bp, Glycine max
  unsure at all n locations
  Clone ID: LIB3167-038-P1-K1-G8
gagagaagaaaacgnnggnnggagaacannaccggaaagagaannnnngnggagggcagaaangnnnagcanngnnngcgcacaccaaagcnnccncaccaacgcccnnannccacnaacgcacaacccaaagnncaggaccaccgnnacccccccnncnncacccaaaaccgncncnngcagnnccccacaacangaacagcaacaancnccaaggaagaagaangagaacaagnnagcaaagnnggca

SEQ ID NO: 50317 - DNA, 336 bp, Glycine max
  unsure at all n locations
  Clone ID: LIB3167-038-P1-K1-G9
cccaaanncacncaaaanncaaggggcaaccaagaagggcagcaacaangncgggncgcggaaagggngggaagggnnnaggaaagggaggagcaaagaggcaacgcaaggggcnccgcgacaananccagggaaacacgaagcccgcganncggagaccggcgagaagaggnggcgngaagagaaacagcggnnngagccacgaagagaccaggggcgngcncaagancnggcncgagaacgcgaancgcgaagccgcgacggacacggagcacgcaaggagaaagacagagacngccaaggangncgangacgcgcccaagaggcagggaagga

SEQ ID NO: 50318 - DNA, 414 bp, Glycine max
  unsure at all n locations
  Clone ID: LIB3167-038-P1-K1-H10
gcagattttncaagaacggcacaaagnaacaacacggcacaaggganacaaacccnnaagccgaannccaannnccagaaaccccaagnnccnaaanncccaagnnnncncggggncggancnaaaaaaccgaaaaanncagcaaanncaacggcggnnnngaaaaaaganncaacnnnnacgcaaaagnnncgnnccnnnaggannncagcancagnggcnacagccngcangcnncacggngcaagcagccggcccgcaaccgcccgcaaanccncnggccccaccggaaccgnccgcanncccggcgacaaggcgancncccaccggncccccaagnncggcggncncgcgagcggngaaacgcgcancaccggccnncnggaaggcgaggacgncancaaaacgggcaag

SEQ ID NO: 50319 - DNA, 393 bp, Glycine max
  unsure at all n locations
  Clone ID: LIB3167-038-P1-K1-H3
gcagnaatatgggctcagatgaggaagnggatgaagataaangancagaagcaacgccgancgagggatagctagcgaaactattctttgtgatctgatgaaaattggactgctttgttatcctctatctggaaaaaatttgttgatgccaaatttcttagatagaagttgagcatagagaagatcattccacgtgtcaggcaaccctgtaagcaccagttgcttgaactcctggtggcatgaggtgaaagcgtccaataactgtactcgtaatgctgcgcgtttaactatcctggaagtaccattgtacagaggctatgtgggcacggaattgggtgcactaaaaaacggactgtgacatatgatctgagaactgattggactgtgctttta

SEQ ID NO: 50320 - DNA, 403 bp, Glycine max
  unsure at all n locations
  Clone ID: LIB3167-038-P1-K1-H4
cacgcgtncgcggacgcgtgggttcagaagcagaaagaggttttccgntccgaaacgatgtggtccatggccatcaccaccagagacagagatcgagagcttctcatccccgtcgccgacacccccgccggcgatgccgccgtctccccttcccccaagccatcgtcgtcggcgtcgtccccgcatcattccggacgcgagactttttacaaagttgttagaagctgggcatcaaaaaagtttatgactggatgtgtcattctctttccaattgcaattaccttctatataaccttcggggtttattcatttcgcggatggatttttctctcctatctatgctcagcttggaattgatatttttggtcttggattcataactttcataaccttcatcttcttg

SEQ ID NO: 50321 - DNA, 456 bp, Glycine max
  unsure at all n locations
  Clone ID: LIB3167-038-P1-K1-H5
cacgcgnncgngnaactaaaactatnctaanngtttctcagannctctcaggttggcttccgctctcccctatcgctctctccctaagcgcatctcaacttgtcgtcgtcggtgattcattctccctaatcataaccctaatcgcatcttaaatcgaactcaatcagagacaaaacaaagttgttgattctgttacaaaacatagcacggtggacaaacgttaaacaaggctacagatctttgattcagttgaaagcagattgaaggggagtaaaacaggaacagagcaacctgcagaattactctatcaaggtgccataaacttgctatatccgtgtctccaatctctttgaaccgtgagagaacagccatggacagacgcacgaacaccaccaggccagtggcattgtcttccccttctatcactgccaccaccaccataacaattttgaactc

SEQ ID NO: 50322 - DNA, 357 bp, Glycine max
  unsure at all n locations
  Clone ID: LIB3167-038-P1-K1-H6
gaaaanggagagagnagctaaggngttggngatgtttagcatggtggtgttggtgcttgcatcaggtgctgaagggggacgattacttgaggaagagaatgtggatcagccccagaccttccttggatcaggtggaggccttggtgggatatttacaagcccaagcccaggcttcagcttcaccggcgtgggctttggcccatctgggttttgcactcaaactggaggtaggaccgctactcctttcttgaccactattcacggtgctggggggtcactaccagacacaacaacacgcataaagaaatgtcttcggtcgaagacccatgctattacttaatggtcaagtcccctaaa

SEQ ID NO: 50323 - DNA, 446 bp, Glycine max
  Clone ID: LIB3167-042-P1-K1-G10
aaatccttttattcagttctatgccgagttgctactgtgttgaagaccaggtatacagcacgcgggtttctggaatgctggactgggcctttttgagcaggctcatttgcttgtttctgatccttctgagaaggagcacttgaaggcttgcattgctcaggccagggaacatttgcatctagaagacaacccatcacaaactttacgacctgcagataatcaggcaaacagagggtatctttttgagggccaccttacggttgatcctgaaccacctcagccgcaatggttggtgcagtcaaacctcttgacaacagctgctacactctttgctgctgaatcctctcaagcttcagaagcaaatgaaaccactcaagatgatgccacaaatatgcttgaagatcttctaaatagattggaagaagttgtgcccttgatggtggatg

SEQ ID NO: 50324 - DNA, 452 bp, Glycine max
  Clone ID: LIB3167-042-P1-K1-G11
atccggctgcataggcatagactagagatagagtttcaatggccgtttctttggcggggaacgcgtcctctgcttggtcttcacgagaatgtaccattagctgttgctcatccccaattcctcccgttcaaatggccacccaagtccaaactcccctccgtcgtcggaattcgatgctcctcctcccctttcaacgacaaaaccctcatttccatcacacctaacacttcccacctcaatcccaaccctctcgcttgtcgctttcacgcttcccagtttggagaacaggagagcaacaaatacgtggaagcctatgctgtaggacgaaatattcgtatgtctgctaataaagctcggagagtgatcgatcagattcgtggacgtaaatatgacgaaacacttatggtattagaactcatgccttatcgagcctgtgaagccattctcaaaat

SEQ ID NO: 50325 - DNA, 460 bp, Glycine max
  Clone ID: LIB3167-042-P1-K1-G12
gatcgagataactagaaacagtgtgatgaaaatgaatgtccttgttttcttcgttgctacaggtttggtagcatggcaatgccatgcgtacgatatgttccctctccgaatgaacactggctatggtgcccgtactccggaggtgaaatgcgcaagttggaggcttgctgtggaagcacacaacatctttggctttgagaccattcctgaagagtgcgttgaagcaacaaaggaatacatccatggcgaacaatatagatcagactccaaaacagttaaccaacaagcttacttttatgccagagacctcgaagtccatcccaaggacacatttgtgttcagtatagatggcaccgtactctctaatattccatactacaaaaaacatggatatggggtggagaaatttaactcgaccttgtatgatgaatgggttaacaagggcaatgcaccggcactg

SEQ ID NO: 50326 - DNA, 465 bp, Glycine max
  Clone ID: LIB3167-042-P1-K1-G4
cccacgcgtccggtttgttgtgagctataagctagtttatcgtgaggagaatatgaagttgtgtgtttgctttgttgctgcagtagttttggtagcatggccatgccatggcgcaggctaccaaaggttccctctccgaatgaaaactggctatggtgagcgttcttcggaggtaaaatgcgcaagttttaggcttgctgtggaagcacacaacatccgagcctttaaaaccattcctgaagagtgcgttgaaccaacaaaggactacattaatggcgaacaatttagatcagactctaaaacagttaaccaacaagctttcttttatgctagtgaacgcgaagtccatcacaacgacatatttatattcggcatagataacaccgtactctctaatatcccatactatgaaaaacatggatatggggtggggaatttaatgaaaccttatatgatgaatgggtt

SEQ ID NO: 50327 - DNA, 424 bp, Glycine max
  Clone ID: LIB3167-042-P1-K1-G6
ttcctgtccccaagcttagcttaagcgaccaacctttctttttcctcgctttaatcgcctccgcgacggcagtggcattcactagccttgtttttgctgctgttcccaccctatttgcaatgagaaatgctgcattatccctttcaaagctggcagatacagctcgtgaggagctccctagtaccatggctgctattaggctttcggggatggagataagtgatctaacactagaactaagtgatctaagccaggaaatagcagatggagtcaacaagtcagctcaagctttgcaagctgcagaagctggaatccgacagattggttcagtggcacaacaacaaaccgtatctatgattcaagagagggcaagtttacccgtaatttctttgcaacctgctgttgctggagctgctagaaagac

SEQ ID NO: 50328 - DNA, 438 bp, Glycine max
  Clone ID: LIB3167-042-P1-K1-H10
cccacgcgtccgcccacgcgtccgctggtaagactgatgacgaagttgttatcaccgtcagcagcaccatgtccatgtctaagggttccaattccaaatccaaccgtaaaatatcgatatgcatacagtcacagagggcaattgcgtgttcgatgcagtgataatagtgatgaagagaaggagaaggagaagaagaagaagaaggaaaagcggttgtctcagcagtcgtcgtgggaagcccaagacgctgagggaagagactatctctaccgacttgggaaagaggctgataacatgaacatcgccgtcggccagcgtgctggcgtcatcgattctcttttcgccggcaattttctcggcaaagattcggacattgtctttgattatcgtcaaaaagtgacgaggtcctttcaataccttcagggcgattattacatc

SEQ ID NO: 50329 - DNA, 453 bp, Glycine max
  unsure at all n locations
  Clone ID: LIB3167-042-P1-K1-H11
gcgtccacgcgtactgacacgcgtccgaagaaaatgaaagtccttgttttctttgttgctataggggtagcagcatggcattgccatggctcanaccatgaccatgaccatggccacacctaccaaattttccctctgagaatgaaaactggccatggtggccactacattccggaggtatcatgccaaagttggaggcttggtgtggaagcacacaacgtcattgactggaaaaccgttcctcaagattgcgagggatatattgggaactacatgcttggcgaacaatatagatcagactccaaaatagttaaccaacaagcttatttctatgctaaaaccctcaatatcactgccaaaaccgcatgggtgttcgacatagatgagactacactctctaatctcccttactatgctgaccatggatttggggtggagttatataatgaaaca

SEQ ID NO: 50330 - DNA, 469 bp, Glycine max
  Clone ID: LIB3167-042-P1-K1-H4
gggatcgacgccacgcgtccgcccacgcgtccgcccacgcgtccggggaattggttgtgaaggacatacaggatacttgcaaactgctggggccaatttacaatgaaacagatggggaagatggacatgtatctcttgcagtttccccaaagctagcaaatgacaccaaggggacaattgaggcagcaaaatggcttcataatatggttggaagtccgtgtgtttacatgaaaattcctgccactgatgaatccatctcttccatgaaggaggtcatttctttggggataagtgtaaatgccactctcatattctgcctccctaaatatgaagcagtgattgatgcttacttggatggccttgagtcttgtggcatgactgatctctctaaggtttcaagtgcagcagcattctacatcagtagagtggatgttacacttgacaagaaacttgagcaaattggtactac

SEQ ID NO: 50331 - DNA, 393 bp, Glycine max
  Clone ID: LIB3167-042-P1-K1-H5
tccacgaatactcaaacattgcatacctcttgatttgtagtttgttttgtgctttagataagggttctgccaaatcaagaggggttttaagatcatagtgtgtgttttgcaacaatggctaagttctttgctgctatgatcttggcactctttgccatttccatacttcaaacagtggtaatggctgctaatgaacaaggaggccacttgtatgacaacaagagcaaatatggaagtggaagtgtcaagagttaccaatgcccatcacaatgctcgaggagatgtagccagacccaataccacaagccctgcatgtttttctgtcagaagtgctgcaagaaatgcctgtgtgtgcccccggggtattatggtaataaagctgtgtgcccttgc

SEQ ID NO: 50332 - DNA, 447 bp, Glycine max
  Clone ID: LIB3167-042-P1-K1-H6
cccacgcgtccgaagtagttgagaactaaaaaggttaagcaattggcttcctcaatgatctctgccccgggtgttaccactgtcaaccgtgccggtgccggcatggttgctccattcactggcctcaagtccatggctggcttccccaccagaaagaccaacaatgacattacctccattgctagcaacggtggaagagtgcaatgcatgcaggtgtggccaccagttggcaagaagaagtttgagactctttcctacctgccagaccttgatgatgcacaattggcaaaggaagtagaataccttcttaggaagggatggattccttgcttggaattcgagttggagcacggtttcgtgtaccgtgagcacaacaggtcaccaggatactacgatggacgctactggaccatgtggaagctgcctatgtttggttgcactgatgct

SEQ ID NO: 50333 - DNA, 425 bp, Glycine max
  Clone ID: LIB3167-049-P1-K1-A1
caggccttttcagtttttcaacaatggcagcagctgttgaagctgagcatggcctggcatggcgaagctatccgtggcctcacaaaggaattcttagttcatatgatcatgcttcgattcgtcgtggtcatcaagtttatacagaagtctgtgcttcctgccattctatgtctttgatatcgtatcgtgatttggttggtgttgcttatacagaagaagaggtaaaggctatggcagctgagattgaggtggttgatggccctaacgatgagggtgagatgtttacacgccctggttaactcagcgatcgttttcctcagccatatgcaaatgaagcagctgctaggtttgctaatggaggagcttatcctccagatctaagtcttattaccaaagcccgtcacaatggtcagaactatgttttt

SEQ ID NO: 50334 - DNA, 365 bp, Glycine max
  Clone ID: LIB3167-049-P1-K1-A10
gggttagtttccgttctgtttgtcaattgtaaagaaggaaataaaacacttctggagggattggaagtgggttattgttcgccgcggatttcttcattgtctcactctaaaaatggaaagagacacatctgggtctgagctcaaaaaaaccatcgtctatgatgaaggaagacatgaatcttgacattcgcagcaaagacacaggtttcacaaatggagcagcggtaaaatggccctccatgaacaaagtatatgtccattctcccttgatgtcattcaatcctcctcatgtgaatcctgtgaaccatcctcatcgtacgaagatgtcttcagatcccaatccagcaccttcagatttcatggga

SEQ ID NO: 50335 - DNA, 391 bp, Glycine max
  Clone ID: LIB3167-049-P1-K1-A11
cccacgcgtccgcccacgcgtccgagcataatcatgatcatattttctgaacctctcaatgcactgtggactatccaagtgatcaagaccatcggtgcatgacatcttagaaagcttaacgcaaattcaggaacttgtgactgaaaagatggtcatggtctcaaccatcaaattcctagcgtaaaacagatggttttttggggtcataattacgtgttaagaggcgctatttatacgattcagtatactgattgcaaagtgcatcattgccacccactaacttattctgcatttcacattcattctagttgtttaagtactataaagaaagtccatgatataatactgtctctgtttctttttaattatcagattttttatttatttatct

SEQ ID NO: 50336 - DNA, 320 bp, Glycine max
  Clone ID: LIB3167-049-P1-K1-A12
cggccggatcggtcgcccacgcgtcgatgactcaacccttacccaccaactttttttaattcaaccaaaccatgccttgttttacttacacttatttagttggttctcaagcgtctgcaccattctttttttgaccttgttcaaattgccataacacctgtctgcggctgaaatgggacttggcactattggattgtcacggcattaggaaataaggttacttaaggctaagggctggggattacaggactaacacacgctagacttgtgcgctgaagggggaatttaagaccgagatggtttagttaaaagataatcat

SEQ ID NO: 50337 - DNA, 486 bp, Glycine max
  unsure at all n locations
  Clone ID: LIB3167-049-P1-K1-A2
ggcgaccacgcgtccgggaaacgaagaagccctaactacgcacgcactcattcttgagaaagctcaatattcattcgtgcatggcactctcttctcgtctcttttccaaatccaaattgatctatggctgtcaaatacttctgcaaaaggagcatgctattccagttcgtcactttgctaaagagtctgcccctcctgcccttaagggagatcagatgctgaagaacatttttgtggaggtgaagaacaaatttgagactgccataggaatattaaagaaggagaagatcaccattgacccagaagatccagctgctgtttctcattatgcaaaggtcatgaaaacagttagagagaaggcaagcttgttgtcggagtcccaagacatactatccaccattgaaatngagactcaggatattccagatgctcggacctatcttctgactttgaggaaataagagtcaagaaaggctacagatgatc

SEQ ID NO: 50338 - DNA, 473 bp, Glycine max
  unsure at all n locations
  Clone ID: LIB3167-049-P1-K1-A3
cgggncgcccacgcgtncgcagaagcaagctcatcctagagttttaaaaatggcagcagcctcctccatggctctctcttggccatgcttggctggcaaggccgtgaagctgggcccatcagcccccgaagtcgggagggtcagcatgaggaagaccgtcaccaagcaggcctcctccggaagcccatggtacggcccagaccgcgtcaagtacttgggcccattctctggcgagcccccgtcctacctcactggcgagttcccaggtgactacggctgggacactgctgggctttcggccgacccagaaaccttcgccagaaaccgtgagctcgaagtgatccactccaggtgggccatgctcggggccttgggctgcgtcttccccgaactattgttccgcaacggggtcaagtttggagaagctgtgtggttcaaggccgggtcccagatcttcagcgagggtgggctgg

SEQ ID NO: 50339 - DNA, 470 bp, Glycine max
  Clone ID: LIB3167-049-P1-K1-A5
taatttcttccatcagatatattttcttcaaaaacaatggcaggcgaggtggtgaagaagggagactcgctcaacctgaaagtcactaacaagagtcatgttcaacctgaggagaaaattggaaggaaagagtaccagctggtcacttttgatcttccctacttggccttctactacaaccagaagctgctgttttacaagggtgaagattttgagggtatggtccaaaaactcaaagtaggacttggtgtggtgttgaaggagtttcaccaacttgctggcaagttagggaaagatgaagagggggtgttcagagtgaaattggacctatcgcttgctgagcccaacggcccaccaacttccaacggtgaggcaaagaccgcgccagcacttacggaaaagatcttcaaattctccgagtcaggccatcgacaagataaagtcaacggtcaacgagaacccctcatccg

SEQ ID NO: 50340 - DNA, 341 bp, Glycine max
  Clone ID: LIB3167-049-P1-K1-A6
gactgatcgaagtccacgagtgcttttgcgagattatatctatggtgggatgagaaccaacagccaaaagaagaagaaaaagctacccttttgtgcatgtgtgcgacctcccaccaagggagattgattgttaccatatagtttgaagtaagtgagacattagctttcttgtttgtaaaattttgtttctaaggatgcttcaagaccctacatattttgatcatgctgtacatgttgtgcctcatttactcgtaagaagaggccaaggctaggatgaatttttgccatttttttcctgtaatatttagttctgaataatcacctttttttctatctggttt

SEQ ID NO: 50341 - DNA, 449 bp, Glycine max
  Clone ID: LIB3167-049-P1-K1-A8
cccacgcgttcgtcctaaccgtaaccctaacccttactgagagatggcggaacactgggcagggatattctttacggagaatgacacggttaactgtccgttctacttcaagatcggcgcgtgcaggcacggcgaccggtgctcccggcttcacaccaagccgacaattagcccaacattggttctgtcgaacatgtaccagaggcccgacatgaacatgagcattatcaccaaccccgatcagccacaaccccaatcccttgaccccgacaaggtgcaggatcacttcgacgacttctacgaaaatctctttgaggagctcagcatgtacggccccattcagagcttgaatatttgtgacaacctcgccgatcacatggttgggaatgtgtatgttcaggttagggaggaagatcatgctggcaacgccctcatgaatcttactggga

SEQ ID NO: 50342 - DNA, 433 bp, Glycine max
  Clone ID: LIB3167-049-P1-K1-B1
cccacgcgttcgtccacgcgttcgtccacgcgtccgtccactcgttcggataactagaaacagtgtgatgaaaatgaaggtccttgttttcttcgttgctacaattttggtagcatggcaatgccatgcgtacgatatgttccctctccgaatgaacactggctatggtgcccgtactccggaggtgaaatgcgcaagttggaggcttgctgtggaagcacacaacattcttggctttgagaccattcctgtagagtgcgttgaagcaacaaaggaatacatccatggcgaacaatatagatcagactccaaaacagttaaccaacaagcttacttttatgccagagacctcgaagttcatcccaaggacacatttgtgttcagtatagattgcaccgtactttctaatttttcatactacaaaaaacatgga

SEQ ID NO: 50343 - DNA, 437 bp, Glycine max
  Clone ID: LIB3167-049-P1-K1-B10
gtttgctgcgccctgatttccatgtttcggcacaaaactgttgggttcgcaaaggtggtgctgatacctgtgaggttagtgctgaaatgcttgttaatttgggaattccttgggttattattggtcactctgaacggaggcagcttttaaatgaatcaaatgagtttgtgggagataaagttgcctatgcacttcaacaaggtctaaaagttattgcatgcattggggagactctcgaacagcgtgaagctggtacaacaacggctgttgtttctgagcaaacaaaagcaatagcagctaaaatatcatattgggacaatgtcgttttggcctacgtgccagtttggtccattggtacaggaaaggttgcttctcctgctcatgctcaagaggtccatgctgatttgaggaaatgggttcatgacaatgtgagtgct

SEQ ID NO: 50344 - DNA, 483 bp, Glycine max
  Clone ID: LIB3167-049-P1-K1-B11
cccacgcgtccgtttcaatttcaatcaacggttatacccttttctatttgagcatcatcatgggcaccgcagcgcagcccaaggccaagaaaacggcgtcgtccaagaagcccctctcccatcctaccttcgccgtgatgatagcggaggcgatagcgagtctgaaggagagaaccggttcgagccaatacgcgataaccaaattcatcgaaggcaagcacaaggagttgcctccaacctacaagaagcttgttctcgttcatctcaagaagtctgttgctgctggcaagctcgttaaggtcaaaaactctttcaagctcgcaccgactaagtctgctcctgttaaagccgctgctgctcccaagaagcccaccaaagctgcggcttagcccgccgccaagcccgcttccaagcccaaagctgctgcacctaagaagaaggctgttgccaagcccaaggccaaagctgcggccaccaagccca

SEQ ID NO: 50345 - DNA, 452 bp, Glycine max
  Clone ID: LIB3167-049-P1-K1-B12
gccaaaagggagctcgcaaaaattcgtggtacaactgaagttgatgcaaaattcagggacagggttgctgatagtgaagcctcacagaatgtgaaacacccttggagaaccttgatggatagaaagtataggccacagcttgtttttgccatttgcattcccttcttccaacagctcactggcttgaatgtgatcacattctatgctcctattttgttcagaacaattggttctggaagcggcgcatctgtcatgtctgcagtgatcattggcagctttaaacctgtttcaaccctgagttcaattcttcttgtcgataaatttggaagacgcacccttttcctggagggtggtgctcaaatgttgatttgccagatcatcatgacaattgctattgcggttacatttggcacaaatgggaacccaggtacactgcctaagtggaatgcaat

SEQ ID NO: 50346 - DNA, 483 bp, Glycine max
  unsure at all n locations
  Clone ID: LIB3167-049-P1-K1-B2
cccacgcgtncggcactgatagcagcgatggggatcgatcttaaggctgggggtaagagcaggaagaccaaaagaacagcaccaaagtccaatgacatctacctcaaattacttgtcaagctttatcgattccttgttcgaaggacagacagcaatttcaatgctgtgatactcaagcgcttgttcatgagcaaggttaacaagcctccaatttctttgtcaaggttaattaagtatacgaaggggaaggaggataaaattgctgtagtagtggggactgtaactgatgatatcagagtatatgaagttccagcattgaaaattacagcactcaagtttacagagagagcacgtgcaagaatagaaaaggctggcggtgaatgcttgacatttgatcagcttgcccttagggctcctttgtgacagaatacggtccttcttagaggccccaagaatgctcgggaagctgtgaaacactttggt

SEQ ID NO: 50347 - DNA, 497 bp, Glycine max
  Clone ID: LIB3167-049-P1-K1-B3
gcgtgagaggttactggccgatgatttgttcctcgctaaggttgtcatggagtgcggtgttggcatcttgtggaaagactgctgcggagttggagaagcgcaaagaaaattttactaaggagcttgattttgtttgtgctgatgtggtgatggccatcgtagcagattttatgcttgtgtggcttcctgcccccacagtttctttccgaccaccacttgctgttagtgctggaactattgctaaattcttctatggctgccctgaaaatgcttttcaggtggctttggctgggacctcatattcacttattcagagaataggtgctatagtgagaaatggagcaaagctatttgctggtggaactggtgcatcactgattggtacaggtgtaactaatgcgttgatcaatgcaagaaaagttggtgataaattctttgctgctgaggctgaggatgtaccaattattatcgaccatgattggctatggggtttacat

SEQ ID NO: 50348 - DNA, 402 bp, Glycine max
  unsure at all n locations
  Clone ID: LIB3167-049-P1-K1-B4
cggtcgaccacgcgtccgccacgcgtncggactgacacagaccctctatgagatagtgacctgaaggaaattatccaacgagaggggccagatgctctacctgaaagcaataagaccaccttaaagacggctacacgtttgagagaggatgatgttgctcatacagcctttacaccatacgtggaattgtgcccccattacaagtctgcttggatgatgcgcatcattctccagttatacaagctggcgaatgatgcgagagcgaggagagctaggctagatgggctggagatgtcttacaccgtgatcaagcatcggatgggagagcagtcctaccgactagcgtctcagtaacttgaggatccagcaaacaggcaagctgctttggttgctatattccag

SEQ ID NO: 50349 - DNA, 216 bp, Glycine max
  Clone ID: LIB3167-049-P1-K1-B5
aacacaaacataagttgcagcattaggtggcatcaccgaagtgcagggagctgccaacagcgtgagaggtcaacaatctttctcgctttgctgtagaggaacaaaacaaaagagagaattcagttctggagtttgtgtgggtgtttagtgcacagcaacaagtggtttctggagtgaattactacataacattgtaagcgatagatggtgtgatta

SEQ ID NO: 50350 - DNA, 470 bp, Glycine max
  Clone ID: LIB3167-049-P1-K1-B6
ggtcgaccacgcgtgcggcactctcttacacactccccatggacttcacccaagacttgcactgtctcctatctgagcggacgggggaagctcgtcgccggagaggccatggaattggacctcgacttcgccttccgcctccagttaaaggaagccctcgcggcctccctcgccgcccagccctccttctcctccgtcgccgtcgtcgcgatcatcgaacaacccgtcgtcgtcatccacgatgacgacgtcaacgccatgacgctgcatcgcgaggagctggcgcgtatggagcgcgagatgaaggaccgttagcagagcgaggcggagacgcttaaaatgagagaggaactctgccgtcggatccactactagaaggtggcgtgggagatttccgcgattcccgagaaggactggcagcagtggggtgacaactttgtgatccattctgagagggctcgtcttctttg

SEQ ID NO: 50351 - DNA, 488 bp, Glycine max
  Clone ID: LIB3167-049-P1-K1-B7
gtcattggttacaagattcagttcgacacaaaatcttgtggagttgactgcggcggggtcggaatccttggcatcgcgtgggcttttggtggcatgatcttcatccttgtctactgcaccgccggtatctcaggtggtcacataaaccctgcggtgacgtttggcttgttcttagcccggaaggtatcgctgattagggcggtgctttacatggtggctcagtgtttgggtgctatttgtggagatgggttctgtgaaggcattttaaagctctcactatgttaattacagtggaggagccaactttttagctgacgggtacaatacaagcaccggactcgcggtagagatcatctgaacattcgtgcttgtctacacagtctatgtcgcttctgaacccaaacacaacggttgagacttccacgttcccgatttggcgccactttcccatggtgttgcggtgtttatggttcaatttggcccttttt

SEQ ID NO: 50352 - DNA, 504 bp, Glycine max
  Clone ID: LIB3167-049-P1-K1-B8
cccacgcgtccgcacgcactcttttcattctttctctgttctcatttcatcttctacacgcgtgtctagtcattattagactcgatctctacgatgaaggcaacactgctttgtccttgttcttctgctcctctgattctcgacacgcatagcaaccgaacctcggcaacgagacacgcttccaccgttgtttgttgttcgtcgaggaaccaaccctacatcccgaagctcgagccttttagccgtaccaaatttgaaagggccgtttaggaccctcctttgatcgaaaaatccgagagagggatcttagattattgttcaacgcttgaaggagaccaatcctatagctgctggcaggcttattttgagctgaaagatcttgtaaaagagtccccaaaagcagacatagagaggctgattctggagactggtggtgtaaaatccctaataagatgcttgcatgggatttcaatcatgcacaaacttaagaagggtgacatgaat

SEQ ID NO: 50353 - DNA, 428 bp, Glycine max
  unsure at all n locations
  Clone ID: LIB3167-049-P1-K1-C1
tcgccacgcgtncgtccacgcgttcgatcacaacaggtcaccatgatactactatggacgctacgggaccgtgtggtagctgcctatgtttggttgcactgatgcttctcaggtgttgaaggagcttcaagaggctaagactgcataccccaacggcttcatccgtatcatcggattcgacaacgttcgccaagtgcagtgcatcaacttcatcgcctacaagcccccaagcttctaagtgtgaaaaatatgcaaagcatttgtagccgccaccccactttgtttgtttgtacttaaactacattcccatttgtttttgctttttgagatttcatcattctgtatttttggtttctgttttcggacttcaatggaatttaatggatgagaacttatgaataagctattgtgttgtgttgctttgtttc

SEQ ID NO: 50354 - DNA, 269 bp, Glycine max
  Clone ID: LIB3167-049-P1-K1-C10
aaggaaactaaaataagacgatcaaggcaatgatctgtcattatctcatgcttctccgacttgtctccagagggacaagtcttgagcttgcacactcgtcttagtatgccacaagccaatcaagaatgtatccgaacccgatgaactcacggtcgccaagtataccatttatgaacataacacgtacccgaacaagaaaccattcttcgctaaggttgctgagagaacgacacatgtgatattccttacagaggacgatctcaaaatta

SEQ ID NO: 50355 - DNA, 333 bp, Glycine max
  Clone ID: LIB3167-049-P1-K1-C11
cccacgcgccgtaataataccaaaaaactccatgttgcttggggagacccaccggcggaatggataccgtacacgtgccaccgtgggctccggagatcttttcaccatacaccggcaatgccgattactcttcgtactccatgcaagaagcacttagtgcacttcagctctacgaatccaccgatgctgagtcagactcggaggttccgtctcgggaaccggaagtcccggtggacgcttactcctgcgaccatttccgcatgttctagttcaaggttcggagatgcgcacgttgctggtcgcatgactggaccgactgtccgtacgcccacc

SEQ ID NO: 50356 - DNA, 302 bp, Glycine max
  Clone ID: LIB3167-049-P1-K1-C12
tttactatcactctctaaagggggccagacgtctcttaatctaagtaatgacacccattaatgctttaacaataattccactgtccttttctactattcatctaaaccacatccaattaatcagactttcctaaattaacgatgaaagaaaaccctgttgatcttgactcttactcgactttttgaaatgacttgataggtgtaatataagtctgagctttaaacatctaaagtgaaataccactacttttaactttattatacttattccatgaatcttaagctaggcacttccccttttt

SEQ ID NO: 50357 - DNA, 444 bp, Glycine max
  unsure at all n locations
  Clone ID: LIB3167-049-P1-K1-C2
tcgtccacgcgtncgagcagaaggagcaaaagcaatggcgccgtagaagccgtgaaccacgacaaggaaccctgatttggttagggggattggcaagtattcgaggtcgcagatgtaccacaagaggtgcatctgggccatcaaggccaaaaacggtggcgttttgccccgccacgatcccaagcccaagcccgaggccccggcccagaagccgtccaagttctaccccgcggacgatgttaagaagcccctcgttaacaagcacaagcccaaacccgcgaaactcagggctagcattactccagggactgtgttgatcctgcttgctgggaggttcaagggaaagagggttgttttcctgaagcagctcccatctggattgcttcttgtaactggtccctttaagatcaatggggttcctctcagaagggtgaaccaatcgta

SEQ ID NO: 50358 - DNA, 407 bp, Glycine max
  Clone ID: LIB3167-049-P1-K1-C5
gaaaaacaaaagcgccgaaagagaaagtgagagagatggagttgaagaaggtgggattggtgcgggtctgtgtaggattcacagcaactactgtggatgctactggcttcaaccctaattccctcatcactcagctgctcccacacatcgagggtgattctgatgataactatgtcaaatccaacaccgaaccgtgctgtgataactgtctttgcacaaactcaattccttccaaatgccaatgtacggattgggcagaagactgccactcagcttgcaaagggtgtatttgtcagaggatatggcctcctcggtgtcgatgtttcgatgaaactgacacatgctatgacaaatgtaccagcaacctccaagaaactgccaaagctcatgatcgctacaactaagca

SEQ ID NO: 50359 - DNA, 431 bp, Glycine max
  unsure at all n locations
  Clone ID: LIB3167-049-P1-K1-C6
cgggcgacccacgcgtgcggagctggagggttttgtgtcacagagttaacctttttattccaaacacgcccttgttcctgcggatggcgaagtctactcgcttgactgggtctttttctgttgttgctcgcgcctgggaccctaaaacgggctctttgcaagaggaggatctccgtgacgtgggaaaactagtggcggcatcttttgcgggtggggctgcaatcaagtacggcagtgctctattccctgagataacgactccgtaccttgagctggctctgctccctattctaactcctgtgcttgttgctcgttttcttttgatcaaggaaagtggttctaacccataataccaaccctttttttatttacaatccagatcatcaaattcgngctactatgtctccattttttctcagaatcggacatct

SEQ ID NO: 50360 - DNA, 464 bp, Glycine max
  Clone ID: LIB3167-049-P1-K1-C7
cgtcttatgcggattctgagggagaagatctacaccatgctgatcaaccgatacagaggcctgacgaatcttctaccggttcaaacgaatcatatgggaaaggtaatgcaaaagctactggagacttttctggaatggcttaagcctttcacatttcttccacaacagcaagggcaatctctatagtcatcgccttctctgctctcacccttccaatcttcatgaaatccctgggacaaggactggctctcaagaccaagcttttctcttacgcaacactactctttggtttctacatggcctggaacatcggagctaatgatgtcgcaaatgccatggggacttctgttggatctggagccttgacaatccggcaagctgtgatgacagctgcaattctcgaattctcaggtgcttcttttgatgggatactcacgtgactagcacgatgcaaaaaggaattc

SEQ ID NO: 50361 - DNA, 365 bp, Glycine max
  Clone ID: LIB3167-049-P1-K1-D1
gtcaaacttgcagagcaacttccagttacgctctgcggaatactggcagaaatcttccatgatgctgccgaaagacgcatcggtggaaggatgctctccaagcaacacaattagatggctctaggtacagtacggcactggccactgttatggatgtcgatgacaatcatggcggggaccacaacgacatatacctggtccatgtaccacatactcgccagaagacagtattctaattcacgcaagaccttgaagaagctcaggtccatgttccatcataagaagccagagcgcgttgtaattagttcacagacacaccttgctctgcccgggctggcgttgttacatcaactattatgaacttc

SEQ ID NO: 50362 - DNA, 321 bp, Glycine max
  Clone ID: LIB3167-049-P1-K1-D10
cacaatactctaaaactagtactatatcttataattctctaatcaacatttcttccgcatggggaccctccacactcattctcctcaccctcaccacatttcttattcccctagcccaagcccaatcccaagcccctgcaccgttcccgtcggtcgcgttgaacctcaccgcgatcctggaaaaggtcgggcaatacaccaccctaatgaaactcctgaaggacacacatcatctcactcaattcgagtcccacctcaaatcaaactcacaaggcttcacgctcttcacgccgacctacaacgcctctcagagcctgaaac

SEQ ID NO: 50363 - DNA, 462 bp, Glycine max
  Clone ID: LIB3167-049-P1-K1-D11
ttcacgctcatctttcagtttcactaacaatgacagtttcttctgagaatggcgtctcaagcggccagagttctctcaccggtcttgctccacttgaagctgtgctctttgatatagatggaacactttgtgattctgatccgctccactattatgccttccgtgaaatgcttctagagattggttttaatggaggtgttcctatatcagaggaattctttattgacactgttgctggcaaacacaatgatgatatagccttggttctctttcctggtgatctggaacgaggtttaaagtttgtggatgataaggaagccatgttccggagattggccgcagagcaactgaagcctttgaatggtcttgataaagtgaggaaatggattgaaaatcatgggcttgagagagctgcagttaccaatgcttcaagagcaaatgcagaactcatgatctcaatac

SEQ ID NO: 50364 - DNA, 472 bp, Glycine max
  Clone ID: LIB3167-049-P1-K1-D2
actgactgcttccctgaggtttgatggagccttgaatgttgttgtcaatgaattccagaccaaccttgtgccataccccaggattcattttatgctttcatcttatgctcctgtaatttcagccgagaaggctcaccatgagcagctatcagttggtgaaatcaccaacagtgcattcgagccatcatctatgatggccaagtgtgatccccgccatggcaaatacatggcgtgctgtctcatgtacagaggtgacgtagtgcctaaagatgttaatgcagctgttggaattatcaagaccaagcgcactattcaatttgttgactggtgccccaccgggttcaagtgtggtatcaattaccagcctccgactgttgttccaggtggtgatcttgccaaggttcagagggccgtgtgcatgatcttcaattccaccagtgttgttgaggttttttctcgcattgaccacaaa

SEQ ID NO: 50365 - DNA, 502 bp, Glycine max
  Clone ID: LIB3167-049-P1-K1-D3
agaaccttcactctgctctcacccttattcctctctttcctttctttcttctgcaacaaaaaggatgtggtgggtccttgggattcttctttgtgggtcttacgttgttgttgttggtcggggtggctaatgctgtggccaacacttccaacaaatttgatcaactctttcaaccaagctgggcttttgaccacttcattcatgaaggggatctcctcaaactcaaactagacaatttttccggcgctggttttacttccaagagcaagtatatgtttgggaaagtcaccatccagcttaagcttgtggaaggtgactctgctggaacagtcactgctttctatatgtcatcggacggtccaaaccacaacgagtttgattttgagtttctaggcaacaccacgggggaaccatactctgtccaaaccaatgtgtatgtaaacggagtgggcaacagggagcaaaggctcaacctttgttcgaccccaccaggttttcactc

SEQ ID NO: 50366 - DNA, 391 bp, Glycine max
  Clone ID: LIB3167-049-P1-K1-D5
taagccgttaagcaccttcaacgccgccgtagtttgttattggtttggtttgatggagatggagggtgagaaacagcacaagtttgatgtggacctctgcaacctcatggctttcgattcctatcacaccttcccttctcaaccatctctttccagggaggacctcatcaaacagtgtttactgaaaggcactcacttggttcaagctatcgcagatgccctctttatcttaccatcgaccgaagatttggatggaccccttgtcaccttgtcctccccactcactaaattgcctagagaaaaacatctgccaaaaccaaagccttctacttaatgggaagcttttgccaaaaagaaaggcattcataaacggaagatagacataattgta

SEQ ID NO: 50367 - DNA, 472 bp, Glycine max
  Clone ID: LIB3167-049-P1-K1-D6
gcgcccactcttctagctccaaggccacacaaaaccaataggaacatgggaacaacaactgaccttaacttggattatgttttgagtcaacgcaaagcatttgatgaaacaaaagctggtgtgaaagggcttgttgatgtaggtgttaagaatgttcctaccttcttccatcaccaaactgagaagtttgagaaggcctcaaatataggcaacaaaagccatgttattccaatcatagaccttgcagatattgacaaagatccaagtaagcgccaagggcttgttgacatagtgaagaaagcatctgaaacatggggtttctttcaggtgatcaatcatgatatccctttgagtgttcttgaggagatgaaaaatggggtaaaaaggtttcatgagatggatacttgagccaagaaagaattttattcgagagatagatcaaaatcctttctgtataatagcaattttgatc

SEQ ID NO: 50368 - DNA, 319 bp, Glycine max
  Clone ID: LIB3167-049-P1-K1-D7
acaatcacaaaagtcatgtaaacattggagaatctctaccaacgagaatctcacaagagttgggatcgagcacgcctctcgagttatctccagctccgaaactccatctggcggattctgtagtagaaaaaatagcaatctttgttggattatctgggaaacactcaaacgggttcgctctgaatccaatggcaaatcaaaccggtgtggactctgcaaacgtgggtgctatgaacagactcgtgagaagaaaacaagttgattatggtcattttatcaaaaacgacggacctcatcagcttgacaagaaactatccgc

SEQ ID NO: 50369 - DNA, 483 bp, Glycine max
  Clone ID: LIB3167-049-P1-K1-D9
ctttgtcagctttttcttgcttccgtatttcatattgcgtgtgttcaagtcatcagaggtggtgtctttgcattggctctagctaaaatttacccctcaacatgtcaagtggtgcagggaaaagtctcctgcgttgactgcactcacaactatgacttatctgatattaaggtttcggtgaggtgtgatggtgtgaaaaaactggctttggctactacagaaaatgatggctccttcaaggttgatcttcccctataccacacaaaaccttcttcttctgtgaataattgcctagcaaaacttcttggtgggccagttcagctttatgtctcaagggaaaaccaggtttcccaaattatcaagggcaaagatcaaaacagctacaccatctccacttcccttagtttcatgacatcatgccccctaaccacaaaatgcaagggtgggaaacagtgtggttcatcgaaaactgtggatctacct

SEQ ID NO: 50370 - DNA, 482 bp, Glycine max
  Clone ID: LIB3167-049-P1-K1-E10
aaaaaaaaacagttagatcataaataatttaaaattaaaaataaaaaaaaataaaagaggtaaggtaaaatattaaaaataaccaacataatatatattgtttctcctaaatttaattatcctatcttacattcatatttgtttaataatctttcattttttattattatttccttatctctattcacttgttgttttttttctactcttatatttttaaaacattgtcttaccccaattatatttttttgttaaatattcctctttttcctaattctattttacttaattttttccttatcattctttttttctaatgtatgcaaattcttattttcttttttcctttcctttattatatattaatttttttatttattttttctttattttttctttaattatcttttcttattttcttttttctttttattcctattttttttatttttcatttattttattttatttttgttttttta

SEQ ID NO: 50371 - DNA, 389 bp, Glycine max
  Clone ID: LIB3167-049-P1-K1-E11
aaacatccttgtggggtaggcactctttgcaaatgtctgccggtatttacacggattggggtgggaccgctcaagcatcgcctaatgatcttgtcaagagaggacctgctagataaggatccatctcgctccccatggagttcgactttcgatcgaggactatccttatgcttctgatgggctagagatatctggatgctatcaagtctcgggtggaagaatatgtctcattctactacatgtcagatttggcactttaaaacgacccctagctccaatcttggtggaaagaacttgctgaggtgggacatggagatctgaaggatatgccatcatgccaaacgatgcaaactccggtagagctggttgaagcgtgcactacccttata

SEQ ID NO: 50372 - DNA, 381 bp, Glycine max
  Clone ID: LIB3167-049-P1-K1-E12
catcaatcccctctctctctctcccaaactcaaaacctaagcatggctcataaggcccagaaggacgacactgagtttaaggtcccctaacccatcatcaacccctgcaccaccaccactaccacaaccacctcgatttccgaaccttctagattcttcgatgcaaccacccccgccactttatcgcgctccccaaagcgatccctccctctcgacgaggaatctcagacggaccaaacgacgtcttctgagcccaaacgcgccgtgaaccgctgctcctgctgccggcggcgcgtgggactcacgggattccggtgccgctgcggtgaccttttctgcgcagagcaccgatacttcgaccgccacgactgctcctacgac

SEQ ID NO: 50373 - DNA, 503 bp, Glycine max
  Clone ID: LIB3167-049-P1-K1-E2
tccacgcgttcgtccacgcgttcgcccacgcgttcgcgccgttacgaagctacccatttcagagggtcaacacatcatagcactgaaccaacggcggccgaaaccaccgttcgacgccgatctttttccaccgtttcttcaaagtttaaaagaaagtcatggcaatgaaccatgccaggtctattagacacattcttaccaccaaagaggtagttggggttgcatgccaacgaactttcgccaccggttaagcaaagaaaggatctaaagggggtgcagctgctgatgcacccaaagcatcaactcttagcaaggaagtcaagtcaagtacagttgtaggtgccagcattctcaaggaaggaactgatccaaaaatccagcctgattcagaataccctgactggttgtggcatctgcttgataaatgccctgcacttagtgaattgcgttggaggaatattgatacactatcttatgaagatctaaaacgttttgttaagctg

SEQ ID NO: 50374 - DNA, 206 bp, Glycine max
  Clone ID: LIB3167-049-P1-K1-E3
ctcattctttcactcccgcacaaaaatggcgtctttgcagcaccccacaggttccctccaagggaaacacgtcctaatcccccgaaacactcttacccagaaacccatcctaaactttctcctccgggcccacttacccccctagctaatctcaggggggccgcccgtcacggctgggcagatgagcacgaccgtccgtgctgccg

SEQ ID NO: 50375 - DNA, 360 bp, Glycine max
  Clone ID: LIB3167-049-P1-K1-E4
ggtcgaccacgcgtgcgtcacgcgttcgccacgcgttcgtccacgcgttcgtccacgcgttcgagatgactcgctcagagaggagaaagaacgaacaattttagcttcaaacacacacaaacacatcgtcatcatcttcatcactctccgacacttgaaactctcatgttgttcctctagaaacctcttccgcaccaccgtggaattttcctgctccttttgcacaaaacacacactctgcttctattataattcatgcttgtccttgtccttgtccttgtgctggtttttttctagatagggtttgcactttttaatcagaactagccaagaccaggtacagaaagtactgtgttagtt

SEQ ID NO: 50376 - DNA, 183 bp, Glycine max
  Clone ID: LIB3167-049-P1-K1-E5
cttacaatggatcctactctcatcactgactccacattctctcccgcttactctctcgccgagagtgggcccgtaatgccccatttacctcctaacttacacaaacacatcttcatcaatcacttcaccctcacacacctgacactcacacgtcgcaagagaaaaaactgcttctacaccacc

SEQ ID NO: 50377 - DNA, 502 bp, Glycine max
  Clone ID: LIB3167-049-P1-K1-E6
gcgcaaaccgacgtcaatggcagcctcatcctccttcttcaccctcttctccttcctcctccctccaaagggacaccctcctcccatcatcactcgcttcccactccagaagctacgtgccaagcatcaggaccaggaccaccactcgtcggcggagctgtccgccgtggcgaacccgtcccacgcgcatgcgaacacgctcttcttccggtcggcgtacaacgtgcaggtggtggtggacgagaacgagccggaggagaggctcctcaaccggttccggagagaggtcatgagagccggagtcattcaggagtgcaagcggagacggttcttcgagaacaagcaggaggaaaagaagcgcaagaaccgcgaagctgccaagcgtaagagcagaagcaggcgctctcaatcgagatttcaaccacaaaacatgccggatgttgcagcaaccaagaaggaagaggatgatgataactgggatcttccagaagtagacgctcca

SEQ ID NO: 50378 - DNA, 438 bp, Glycine max
  Clone ID: LIB3167-049-P1-K1-E8
tcgctggaaacagctgaacagaagatagcatagcttacatcaaaggttaatgaacaacagaaattggtacagaagttggaagatgatattttaaagggatatagttcgaattcaaaagaccgtaaagggaacttccttgatgattgggatctttcagaagctggtgggggtgaggtttctgagaatacagaccaaaggcaagtatccttagaccaagatcagagctcaatgcttaaagtgatttgtaatcaaagagatcgatttaggacccgcttgcgagagacagaagaggaaataaggcagtttgaaggagaagattggggtattaacagtggaactggaaaagagcaaagctgataatgtcaaactttatgggaagattcgttatgtacaagactataatcatgagaaagtgatttctaagggttctaaaaagta

SEQ ID NO: 50379 - DNA, 459 bp, Glycine max
  Clone ID: LIB3167-049-P1-K1-E9
cccacgcgttcgcccacgcgtccgcttgctttttccatctgagtgttgaacagagaggaagggagaagccaatcatgggttgcacttcactgccatcttttattcagatgtcatctgctacacactccagcttcagtgaaaaactccgcaaccctcaaaagaagtctcaaattgtgatacctacaactacaagagagacacacacaacaatttcttggtctttttcttctcaatgcaaagctcttcacaaatcagttcctttggctgcttcacttgcaattcttctctggtcaacccctgcacatgctggtttcatgtcaggaatttctggaatagaggctattcctggtcctcagctacctcagattgactttctcaagcagctcaatgaagaaaaccagaagaaatatgctgagaatgatgagagaattaaatcatcccccttgatgaaggaactgc

SEQ ID NO: 50380 - DNA, 446 bp, Glycine max
  unsure at all n locations
  Clone ID: LIB3167-049-P1-K1-F1
cccacgcgtgcgccacgcgtncgtccacgcgttcgatcagatatggaagaacccgtcatggaaccacaacccggcgctggtgctttctctgggaacaccaccagactcaggcttcagaagtatgcgctccgatctgtcaataaatcgaaggaagacaagtcagaaactcccaattgctccaatcctacttctgaaaccaagagggggagaagtgtaggtgcttcaagtgtaagtaaaagtgtgagtgttcttgatttttctggcaaggacaagtctggtagtgccaagccaccaagaaggctctcaattcctgccaaaacaccagccactttaagacccaagctgtgtggcaacattatcccaatcactgtgactacaactgggaggaatgcttttggtcaaggcagaagcaaaacaccaaantctgacatttccaagacatctac

SEQ ID NO: 50381 - DNA, 427 bp, Glycine max
  Clone ID: LIB3167-049-P1-K1-F10
aaataggtagattatataagatggatctatcgtatacttatgcaaagaacacaggggcagaggaagtggaagaacatgcgcttccatattattaactgacctactctattaaaacagcttggctgatcatttggctaaagccagttaggggtgcctcacagaaaaagagtatctttgacgttaaagcgcctggatctgcacgtggtgagcagggagccaacagaccatatgtgttttgcttcatcgcagactatctattacttggatggcagccaacctggtgactatggcttcgaccctacttggtctttaagacccacaaggtgctggaggattcattgagccaagatggctagcatactgtgagaacaagaactggcggtttgccatgttgtctgcatctggagctattgatcctgtggtttta

SEQ ID NO: 50382 - DNA, 479 bp, Glycine max
  Clone ID: LIB3167-049-P1-K1-F11
gtgtgtgtagcaaagggtggtggtgtggtgcttgttgtggttggtggtggagtgcgcaggataagcggcaaagaaggttgagacagaagggtcagctgaaaagaaagaggaggaagtgattgcagaagctgaagctgagaagaaggaggaggtcacagtcacagacacagaggctccaacagagtaaaagaatgtgaagaggggaaatgtgcagtttaagtgagtgtttgagagggtatttttttcttagttgcatcgtgtcttgttgctccatgcatgtcttttctttgtttagtggtctaataaaaagtctaactagggaagggatgagtgatgcgaatgccaaccactcagtacaagaaccacatggcatgtagtctttcaatctgatctattgggtgtgcattggtagctcttcatccaatgaaatatgttatggtccttgggtgattcgatctgcattcaccgtaacttttttt

SEQ ID NO: 50383 - DNA, 509 bp, Glycine max
  Clone ID: LIB3167-049-P1-K1-F12
aaagagagagagaatttcattgaccgccattgaagctttgcttcttctatctctcactcatagcaaaattccccacacacattcttcattttctcattctctccaatttcaacactgttacggttcataattcttccaattaagacaaaatttgaggtgtgtacggttcaattggaccttctacgctgcgttttgttcgctcaatggaccaagctccgggaggattgcgcggatccgtgcatgacggcgctacgctcgagtcaattcaattcaacgaagaaattcagggaatcatggcgccggtgccggcgccggaaaacgctaactcgttcaccgcgctgcttgaactcccgccgacgcaggcggtggagctccttcactcgccggaatccgacagcgctcggaaaccgcctaattgccacgtcagggcgaaccagaaaccctacctgcccaactctttcggcagcaatttaaccttcccttccaacgccgtcttaatcgaacgcgcc

SEQ ID NO: 50384 - DNA, 426 bp, Glycine max
  Clone ID: LIB3167-049-P1-K1-F2
ctctttctgagatatttcgaatttcgatactttgatcagatccacaacactccttcatccatgacgcttggctcttcaggatccagtgtcgtggttccaaggaacttcagattgctggaggagcttgagaagggagaaaaaggaatcggagatggaacagttagctatggaatggatgatggtgacgacatttacatgcgctcttggactggaaccattattggcccctataatactgtacatgaaggaagaatttatcaattgaagttgttttgtgataaagactacccagaaaagcccccaagtgttcggtttcattcacgaatcaatatgacttgtgttaatcatgaaactggagtggttgaatcaaagaaatttggtcttcttgcaaattggcaacggaggtttaccatggaagatatactg

SEQ ID NO: 50385 - DNA, 439 bp, Glycine max
  Clone ID: LIB3167-049-P1-K1-F4
cccacgcgtccggattgctagaatggaatttcgatgctcattcatctcttttaccattctctggtctgtggctcttgcaggagagagccatgtccatgcatcgctacctgaggaagattattgggaagctgtttggccaaacactcccattcccactgcactgcgagagcttctaaagcctctccctgcaggtgttgaaatcgatgaactccctaagcaaattgatgatacacagtacccaaaaacattcttctataaagaagaccttcatccaggcaaaacaatgaaagtacaattcaccaagcgtccctatgcacaaccttatggtgtatatacatggttaacggatattaaagacacctctaaagaaggatatagttttgaagagatatgcatcaagaaagaagcgtttgagggagaagagaagtttgtgcaaaat

SEQ ID NO: 50386 - DNA, 508 bp, Glycine max
  Clone ID: LIB3167-049-P1-K1-F5
accacgcgtccgagaaacaaaatcaccaccttcaaagtcttctctctcgagtttcatcgaataaaactaggggtgccgagcgtcgtcgaggagaatgccgaagaacaagggaaagggaggaaagaaccggaagcgcgggaagaacgaggcggacgacgagaagcgggagcttgtgttcaaggaggacggccaggagtacgcgcaggtgctccggatgctggggaacggccgctgcgaggcgatgtgcatcgacggcaccaagcgcctctgccacatccgcggcaagatgcacaagaaggtctggatcgccgccggcgacatcatcctcgtcggcctccgcgactaccaggacgacaaggccgacgtcatcctcaagtacatgcccgacgaggccaggctccttaaaggcctacggcgagctttctgacagcaccaggctcaacgagggcatcggcgctggccttgatgaggaggaggatggggccggaaatgattatatcgagttcga

SEQ ID NO: 50387 - DNA, 417 bp, Glycine max
  Clone ID: LIB3167-049-P1-K1-F6
gaccacgcgtgcgttaggcatagcgaaaatgacaaccaccttcgcgtccgtctcaggactcggtggtgcatcactgtcatggacctcatctcgtctcacctcagggtttgtgaaatcgccagtgagtgctaggaatcccttgaggcaagctgtggcaatgggaaatgggagggttacatgcttcgagaggaattggctgcgggcagattacagtgtgattgggtttgggttgattggttggctagcaccctcaagcgtaccggctatcaacggtaaaagtctgactggcctcttctttgagagcattggagctgagcttgctcactttcccacccctcctgcccctacttcatccttttggttatggctggttacgtggcaccttggcttgttcatctgcctcacttttgggcaaat

SEQ ID NO: 50388 - DNA, 310 bp, Glycine max
  Clone ID: LIB3167-049-P1-K1-F7
gctaacaaggatgcccccatccctaggtttgagctgcagctgccgcaaccatgtcagagcccagcagccatggctttggttgatgagagactcatcactgaaagaactgggcttccctttgggcttagcaacaaccttcttggttggatcctagttggtgtctttggtctcatatgggctcttatctttgtctacacttccacccttgaagaggatgaagagtctggattgtccctctaaacccccatgtgatgatgcatgtattgtagaaattgcaaagagttatggttcttttctgttgtattaaaaa

SEQ ID NO: 50389 - DNA, 508 bp, Glycine max
  Clone ID: LIB3167-049-P1-K1-F8
cgtttacacatctctccaacctttcactttcgtttttcagttttattcgaatccctctctcaatctcctttccaaatggccagcgttgaggttgcacagcatacaccaacaacagttccagaaaatgaaacaaccgaggtaagcaagacccaggaaacaaccccagtcactgaggctcctgcaacagaacaaccagcagctgaggttcctgcaacagaacaaccagccgctgaggctcctgccccagaatcaaccaccgaagcaccaaaggaagaaaccaccgaggcaccaacagaaacagtagaaaaaacaactacagaagtagccccagaggagcctaaagaagttccagttgagaccgaagaggtggtggcaaaggagacagaggaagagaagccagcagaagagaaatcagaggagaaaactgaagaagtgaatgaagaagcagaggagcctaaagaaactactgaaacagaatcagcagcagcagcaccaccagcaaccacag

SEQ ID NO: 50390 - DNA, 483 bp, Glycine max
  Clone ID: LIB3167-049-P1-K1-F9
tccacgcgtccgtccacgcgtccgattatgttgttttatgttcgtgtggctttcttgcctctgacaacattcccctgtgattgctgggaacatgcacatacatatatatttataaaagggttgtgttagagcctagaggctcatttgtttccatttcttcttctctctcattgacacatccttgttgtgctgcatgccttatgcaatatatttgcacatacaataatgtgtgcatatatacatatatatgtatatatatcatttgttagggacatgttaatgtactacaacaaaaacattaacatcatctgaggttaatttgcattttgcaacaacagttactgatttggcgtgtttgaactttgaattcaaatgacgcaattaccttcaaagatcccaaacatgtcaccaagttggccagatttctcttcacaccaccagaagatgcaattgccaactttttaattcggttgctacaacaat

SEQ ID NO: 50391 - DNA, 430 bp, Glycine max
  unsure at all n locations
  Clone ID: LIB3167-049-P1-K1-G1
tctctagattctcgctccgaattcgttccttcgtttgttcctttttcgcattcgtcttcgcgcggatcgcgagtgcgtcaattcgaatttcgaaagcctagggtttctggaaagcatggttgcggagctagggttttgcgcggatctagggtttcgcgggttctgagggcttcgggtgtcgaattaggagggggatttgatggtacgcgttggggaaaatgcgaggctatgcatgggcgtggaggtgagaagggtaagaggactcggcacatgtggaaatcctccacacgtggcgactcgtctttgaacgccgatgtttcttcgtcttcttcttcgtcgtcgtcgtcagtgaagtcgntctgtaaggacggtcgcaaaattagtgttggtgaatgtgctctctttaaaccatctgaagatcgcccaccat

SEQ ID NO: 50392 - DNA, 138 bp, Glycine max
  Clone ID: LIB3167-049-P1-K1-G10
accactcctaacagtacccttaatatattatgcaccatattgacacctcatctgtgcgctaggacgattatgtcataacaactctaacctacatcgaatatcccttcatggcattcaaactttacctgtctttgaagc

SEQ ID NO: 50393 - DNA, 418 bp, Glycine max
  Clone ID: LIB3167-049-P1-K1-G11
tcgcccacgcgtccgctgctcatgaggtggagttttcaggtggcggtgtaaatttgggtggattggcgagttcttttcatgcccagcttgtcttggagggaatttaagtaaacaaggattgggattcaggcttggtggttaacattatgttctaatggttgtgatggcccacgacgtgaagcataactggtttctgatttcgaaaaatgttatcaatgattgcagtcatcaaaattggactgggtttgtagtattagattcagggtgctccgaataatttagagttttctatttttttaggattcttatatttgcacgttacaattttcctatattttttatcgggtttgatataaaggataatgatgtacaagaatttcccttgtatttatgaagccatagctattaaatttctttt

SEQ ID NO: 50394 - DNA, 429 bp, Glycine max
  Clone ID: LIB3167-049-P1-K1-G12
tcgacaagttttccatcacaaaagctgattctggaagttaagtggaagatccggagttgggagaagcaatcctgttgacaatattgaataatatgattcagtatcacccggaatcaatcgcccaattagctctgggagcagcttttggacttgtgcctccaaaagagcaggttgacttggagatagcaacccaaataaccatctctgatgacggcccaaaacgaagattgttgtatgtggagacagctgatcggcctggattactggtggatcttgtattgactattactgacattaacattgccgttgaatccggagaatttgacactgatgggctcttggctaaagcaaagtttcatgtcaactacatggataaagcccttatcaagcctttccagctggttctttgtaacaacttgagatattttt

SEQ ID NO: 50395 - DNA, 373 bp, Glycine max
  unsure at all n locations
  Clone ID: LIB3167-049-P1-K1-G5
cacgcgttcgtccacgcgttcgttttttttttttttaataaaaccttcaatggccctaatgcgatntcctgccattacctttcgtagttatctcaatattatcagtatttttttaccctcgtcattccctctcgattccgtgcataataaacatttacaggagaacacttaacatcaagcagaagcatttctgcttagcctcttcaatttcacgttacaagtttttcacaagtactactaatccaactaagggaaaatgttctaattacaaccaaaagccgggaagaaaagacttttacaatatggctggtatagtgacgaggcacaagaaagactcttctttttaagaggaggatgagaaggtgtcaatgat

SEQ ID NO: 50396 - DNA, 430 bp, Glycine max
  unsure at all n locations
  Clone ID: LIB3167-049-P1-K1-G6
cgcgtgcgccacgcgtncgatcaccaacaagtgtttctgttaccatggcatccaccactctatcccctacaaccgggtctcagctatgctcaggaaaaagtgggattttcagttcctcacaggcacttcttgtgaagccagtgaagaggcagatgatggggaagagcaagggattgagaattgcatgccaagccaccagcatttccgctgatagagtccctgacatgggcaaaagacagctcatgaatcttcttcttcttggtgccatttcactccccactgctggaatgcttattccctacacctacttctttgttcctccaggttcaggttcttcagctggcggtactgttgccaaggatgccgttggaaatgatgtaattgccgagaattggcttaaggcacatggacctggtgaccgaacccttac

SEQ ID NO: 50397 - DNA, 340 bp, Glycine max
  Clone ID: LIB3167-049-P1-K1-G7
gcactagttgctatcaagttgatcagcaaatgggctattaagagcattttggaaatttgatgatgtcctaaacctggatgcattgcctgcttggtgtctgggtaccaaattgctggtagtttgtcactgcgtgtgcagcaacttgatgttcgatgtgagacgaaaaccaaggacaatgtctttgtcactgtgggtgcatctgtgcaataccgaactttgtctgagaaaagcattgatgcattctatttgcttaccaacacaagggagcagatccaatcatatgtttttgatggtcaataaggccagtgtaccaaagtggagttggaatctgtctttgagc

SEQ ID NO: 50398 - DNA, 452 bp, Glycine max
  Clone ID: LIB3167-049-P1-K1-G8
attttcttcatctttattctgctttcgcaatcctctatcccttccctcgggccccagctggggggtcattcaacgggtcagatctctccgctggattgtgctagggtttacccaaacccgccaccatcatcaatttcatcatctctcttacctattaatccctctcactccttctttccccattccttttctcagcgcagtatctactgctctctctctccctctccctctccctccaaatttttcttcattctcacgcgccgccgtggtttccgccggcggctactccctattcaccgcgcatccatcccgctttcctctcctcgcttttttcacaaaacaaaaaaaattaaaaatttctccgaagactgtgtattatcgttatcgttcactgagttaggtttttgctggtcttcctagggtgttattgtgtccaataacaagaggggggg

SEQ ID NO: 50399 - DNA, 493 bp, Glycine max
  Clone ID: LIB3167-049-P1-K1-G9
gatctttagaagtagactgtttactctgtattgttggaatgaagttatggatggaatgttcacagtttacttgctgcagtcatgttccaagaggaaataaatggaaaacttcgtaaattgattttgtactttaaatcattatacagtatcataacaaacatctgttatgcaggacggacatccacctttgggttggcaagatactgcagcatatcttgttttacctattcttcttgtcgtttctcaatacgtttcaatggaaatcatgaaaccacctcagacagatccttctcaaaagaatcaacttcttattttaaagtttcttccactcatgattggctacttctcattatctgtcccatctggactaacaatttactggtttataaacaatgtcctgagcacagctcaacaagtatggttgcgaaaattgggaggtgcaaagccttgtgtgaatgaaaatgctggtgggattattactgcaggacgtgct

SEQ ID NO: 50400 - DNA, 496 bp, Glycine max
  Clone ID: LIB3167-049-P1-K1-H1
gagaaaaaccatggcaataacactcaacaatggcttcaagatgcctatcattggattgggcgtgtggcgcatggaaggaaacgaaatcagggacctaattctcaattccatcaaaattggttatcgccattttgattgtgctgatttggatgcgttgttggcttgttgcagctgactacaaaaacgaagcagaagttggagatgcgcttaaggaggcttttgatagtggccttgtgaagagagaggatctcttcattaccaccaagctttggaattctgatcaaggccacgttcttgaggcgtgtaaagacagtctcaagaagcttcagttaacgtatctagatttatatcttgttcactttcctgttgccgtaaggcatactggggttggtaatacttctagtcctttgggtgatgatggggtcctggacatagataccaccatattcctggaaacgacctgtcatgcaatggaagatcttgtttcatcgggctt

SEQ ID NO: 50401 - DNA, 269 bp, Glycine max
  Clone ID: LIB3167-049-P1-K1-H10
aacgtaacaaacaaaagaaaaaacctctggttcttcctttgttttctcaattgcccggcctggtctcagccttttctgtctctccttcctcttgccatgattggaagtaaagatcgtgttgttgactctgaaggtgaaaactccaggagcaagctctcaaggcacaattttgaggccaacaaggagtacccagatgaaaaaggtgttgaatttctgagagattcaaaagtgggtggtggtggtgttgatggggtttttcactcaaaacc

SEQ ID NO: 50402 - DNA, 293 bp, Glycine max
  Clone ID: LIB3167-049-P1-K1-H11
gacgatgatagtatttctgtcacactgtctcccatatatggagacaagcctgttagagattaggtacgtatggataaagcgtgtttatcctgaggtagacgatgaataaatctaaattatgtgtgtgctactgctagggtttgtttctccggggatactctatttgtcatttgttgtttcttaattagtgtgttgtagttatttgccttggaacttaatagatccctttcatctttgagggatactatgatattgttataataaatgttagttaaattgtttgttttattggt

SEQ ID NO: 50403 - DNA, 530 bp, Glycine max
  unsure at all n locations
  Clone ID: LIB3167-049-P1-K1-H3
gggtcgcccagcgtncgtggagttgagaaggtggcattggtgaaggtagctttgttgcttttcctgttagggttcagggcaaccactgcagatgctactcgcttcgacccacgttccttcattactcaggtgctccccaacaattactatgtaaaaatcaaatccacagccactgcatgttgtgatctttgtctttgcacaaaatcaaaccctccccagtgccaatgtgtagatgggagcgagacaggctgccactcatgttgcaaaaattgcatttgcaataagaaatttcctcggacgtgtttttgtggagatataaccaacttctgctatgacaaatgtaactcaactgaagccaattaaagctcactagctaggaatatgaatgagcatgtttccataaataagttgtgagggcaagcccctttaggctttgtctacttgtcttcgtgcatgtatgcatgcatattaattactatttcaataaataaataaataaaaactacttgggcttaganaaaaaaaataaa

SEQ ID NO: 50404 - DNA, 356 bp, Glycine max
  Clone ID: LIB3167-049-P1-K1-H4
tatcccccaattgcaactgcaaccctccattctcaatctcattctcaacctcactctcaccatcatcaccatcatgctgttgcctcattcaatcgcatgcttcttatgcgccctcccccacccaccttccattttgacaacattctgagttcccttgtcaagaacaagcattatctcactgtcatttccctttttaaacaattccaatcaaatggggttacacctaacctttgtactctgaacatcctcataaactgtttttgccatctggctcacatcacttttgctttttctgttttcgccaacattctcaagaggagttatcatccggatgcaattaccctcaacacactcat

SEQ ID NO: 50405 - DNA, 438 bp, Glycine max
  Clone ID: LIB3167-049-P1-K1-H5
gcgtgcggatgtacgggggagatctgattcgggagggtggttgaggggctgtctggtggttttcgcaggggtcggggcgttgggcgtgtgtggccctgctctttactggcgattcaagaacgccatcactctccgcaacaacaacaacaaactctcttgcccttcctgcctctgtgactgcccttcccctctctcgctcttccaacttgctcctgggctggcgaatctctctgtctcagattgtggaagtaatgacccggatctaaaggaggagatggagaagcagtttgtggaccttctcagcgaggagttgaagttgcaagagtctgttactgtagcaaacactccgcacatgaacataactttgggtgaagcaaaaagagtggcgtcttagtaccagagagaggcagataaatgcataactgcaactgaaacatg

SEQ ID NO: 50406 - DNA, 329 bp, Glycine max
  Clone ID: LIB3167-049-P1-K1-H6
acccacgcgtgcgccacgcgtccaatatattcagcttcttgtcttttccggtaccttattcccctgaaatcactgatccacgacaagaggcactcagagagcatttgttgatttggattcggaaggttccactttgtttatggaagcaactcagctcccttcctctctctttattatccacattgcacaaatgaattttcacggtacttgttgtcagtggtggttgacaaagatattgactatgcgaattctgagcactatatcaagcttttttggatctggaatggtaacttcaattgggctagtcattgtatactatttgatcatat

SEQ ID NO: 50407 - DNA, 504 bp, Glycine max
  unsure at all n locations
  Clone ID: LIB3167-049-P1-K1-H7
gtcgcccacgcgtccgttagttagcatcangagaaaaagaaaaaacaatcttaaaaagaagaaaaaaaatgtggatggcgtgttcaatcccatgcatcaaaatcccaacacgttcctcttccccatcttgcactttatccagttcatcctattctttgcggttctcttcttctaagcctcacaacagtgtcaccataaggaattctcaagctgaaaggcctataagaaggccagtggcacccccaataagagaaccatcatcatcatcaagtgctccacagcttcagaagccaacacttccttctcagcctccatcaccatcctcttcaccccctcagaagccagctactgttgttggggatgataagaatgtcattacattggagtttcagaggcaaaaggctaaggagttgcaggagtacttcaaacagaagaagcttgatgaagcaaatcaagggccctttcttggtttcattgggaaaaacgagattagcaatggaagat

SEQ ID NO: 50408 - DNA, 414 bp, Glycine max
  Clone ID: LIB3167-049-P1-K1-H8
tttcactcttacaataaaaacatatgactttgcataaccgctctctgtgaatatgtggactaggtggacacatactttgggcgccaaatttatagagcatcacttattcacacgcatactctcattgctgaaccaatatatgcctgtaaacatgacccttaagacagagactctgctcatgaattgagactactagctgaacatctcaagcatctttaccaaaatcacttactgatacactaaggaatgtacttaccaagggcataaacaattcctaagacaatacaaaccctcatacctattggtcaagggtcgctttcagatttgtatcaacaacacacacttttcttgcaccataggcttggacttgaacagacaagcataccattgctaggtcactgcttcaattattaa

SEQ ID NO: 50409 - DNA, 214 bp, Glycine max
  Clone ID: LIB3167-049-P1-K1-H9
gtggtcttattttctttgactgcaccacaattgtggggtgtctccaaaatcattgggtttggcttttgtctgccaaagttagggtctttagaattagcgtttgcaaagcccagcttttggagatttatgattagggttttggaggggagagggattgtggggggtgtttggttggtgagaattatgaaattgagggtaaatgttggttgtgctt

SEQ ID NO: 50410 - DNA, 329 bp, Glycine max
  Clone ID: LIB3167-050-P1-K1-A1
ataattcccatttccatctctttctgagtatcaacatatggcaaccactgcgatgaccactcggccacaattcaggggtcttagaccacaaccatcagctgcccatgtgacgaacttgattgctgggcaacccatgagtcccaaggctaaaggagcatcgggagctcgatgtgactacatagggtcatgcactaatccgatcatgagcggcttgtacaaccactacgctggctgctgcatggaccggatgagctccatctgcatacaggaaagccactgcttgcctaaagctacaggagcgggactcaggcttgctaactggtgaccct

SEQ ID NO: 50411 - DNA, 397 bp, Glycine max
  Clone ID: LIB3167-050-P1-K1-A10
gatcgagataactagaaacagcttgataaaactgaaggtccttgatgatcttcgttgctgcaagaatgattgcatggcaatcccatgcctaccatatgttccctgtacagaatgaacactgtcatatggtgcccgaactccttcggcaagatccgcaagttgtacgttagatccaaaagcacacaacatgttttgctttgataccatcactgccgagctcgtgcaaacatcaaaggcatgcatacatgacgaactgcttatatcagtcttcccatcagcttaccaacatgcttacttttataccacagacctatgagtgcatcccaaggacacattggagctcaaagtagaatgcaccgttctctctaatgtcccatactacaaaatacatggttat

SEQ ID NO: 50412 - DNA, 462 bp, Glycine max
  Clone ID: LIB3167-050-P1-K1-A11
cttttgctttatgttattacagcaaactgaactgtagcaagttccatccatgtctcggcttgggaagtcaacaggtcagcagcaaatgtttcattccctacaccaaattctgtccccatacatgtcaagtgttgttgtatctgtgttattgtggcatgtcattgctgtgcttttggtttcaaatttggcctttgcttcaagccttgaggaaacaaatggacacccaaaacacaaaggtgaggtgatctatgcccacaatggagctgttgccactgatgaccgtagatgctcaaggattgggaaggatgttcttagagaaggagggcatgcagtggatgcagcagtggcttcttccctcttgttgggggttgtgagtcctgcttcaagtggccttggtggtggagcctttttgcttctcaggttgaataatgggggggcaaggcttttgatatgagagaaact

SEQ ID NO: 50413 - DNA, 252 bp, Glycine max
  Clone ID: LIB3167-050-P1-K1-A12
atttggacgaaaaggtcatgctgtgggagatattcctggtgtcaggtttaaggtcgagagaggctctggtgtctctcttttggctctcttcaaggagaagaaggagaagccaaggtcttaaatttgtggagtacttgtgtttgttttcaatagtttctctcaagtattatgaattttgtttttaggtgaacgggttttatgaacaattttctatcttttctagttattttactgaacttcatttaacatttc

SEQ ID NO: 50414 - DNA, 504 bp, Glycine max
  Clone ID: LIB3167-050-P1-K1-A2
ggcccacgcccacgcgtacgcgtccggaaacaccaaacccaagtgattatgtgttccttcaaaacatggttcaattgggtcagcattttccttgcctcggctgcaacacccatcttctcattaacagattccccaaatcaactctccacaaactttctagaaattgccaagaaacctgaagtatttgattggatggtgaaaatcagaaggaagattcatgagaatccagaattgggttatgaggaatttgagaccagtaaactcattagagaggaattggataaactgggtgtcccctataaacacccagttgctgtcactggtattattggcttcattgggacaggaaagtcaccttttgttgcaataagaactgatatggatgcacttcccatccaggaaatggtggagtgggagcacaagagtaaagtacctggaaagatgcacgcatgtggtcatgatgctcatgtcgctatgcttcttggggcagcaaagattctcaaa

SEQ ID NO: 50415 - DNA, 500 bp, Glycine max
  unsure at all n locations
  Clone ID: LIB3167-050-P1-K1-A3
acgcaaaaaattctcgtcttttctctgangtcgcagacttttaccgttttcctatattctcttgtccttagcagtcaccgatctctcatggtccaatcaccaaacatcctcacattttacctttcaccgagtcgttctcacgcctccatcttctcaattcgccacagcacaaatccccaaccggctttgggtgtccagaaggagaagctcagccaccttcacttcttcttccacgacatagtgagcggtccaaagcccaccgcggtgagagtggcccaggcccacatgaccaacaccttctccacgcttttcgggctcctgatgatggccgacgacccattgaccgtgggccccgagcccgggtccaaactcgtgggaaaggcccaaggaatttacggatttgcgtcccaggaagatatgggtttattgatgatcatgaatttcgcgttcaccgaagggaaatacaatggcagcacacttagcttgttggggtggaacgc

SEQ ID NO: 50416 - DNA, 505 bp, Glycine max
  unsure at all n locations
  Clone ID: LIB3167-050-P1-K1-A4
agagtttgttgtgagctataagctagtttatcgtgaggagaatatgaagttgtttgttttctgtggtgctgcagtagttttggtagcatggccatgccatggcgcaggctaccaaaggttccctctccgaatgaaaactggctatggtgagcgttcttcggaggtaaaatgcgcaagttttaggcttgctgtggaagcacacaacatccgagcctttaaaaccattcctgaagagtgcgttgaaccaacaaaggactacattaatggcgaacaatttagatcagactctaaaacagttaaccaacaagctttcttttatgctagtgaacgcgaagtccatcacaacgacatatttatattcggcatagataacaccgtactctctaatatcccatactatgaaaaacatggatatggggtggaggaatntaatgaaaccttatatgatgaatgggttaacaagggcgacgcaccggcattgccagagactcttaatattacaaca

SEQ ID NO: 50417 - DNA, 471 bp, Glycine max
  unsure at all n locations
  Clone ID: LIB3167-050-P1-K1-A5
cccacgcgtccggttccccccaaaaataaaatgaacaagggtctctcctttgtgctgctgatgcttgggatccactacaacaacgttgtcaacgccaacaacaaaaactgtgtcacagaggattgcctcatcggcaacaatgatttggaatcagaattctacttcggttcccatgtggccagaatgctctacgatgtgagccaatctgtgtctggccaaacaggcaattcaaacaacaaagctgttaattgtccacaaagcaatggctaccgaacctgcttgccttccaaaaacggtggtggccctaaccaaagttgtggcgattacaccagggtttgctaaagaacatgttccaatccttgtaatttcatttctcatttttaaggttgtcatatgatggagaatctcatttattttagtttaattnccctatgttatcggcttcttttttatattcataagtcaggtaca

SEQ ID NO: 50418 - DNA, 498 bp, Glycine max
  unsure at all n locations
  Clone ID: LIB3167-050-P1-K1-A6
gagtttgttgtgagctataagctagtttatcgtgaggagaatatgaagttgtttgttttctgtgttggtgcagtagttttggtagcatggccatgccatggcgcaggctaccaaaggttccctctccgaatgaaaactggctatggtgagcgttcttcggaggtaaaatgcgcaagttttaggcttgctgtggaagcacacaacatccgagcctttaaaaccattcctgaagagtgcgttgaaccaacaaaggactacattaatggcgaacaatnttagatcagactctaaaacagttaaccaacaagctttcttttatgctagtgaacgcgaagtccatcacaacgacatatttatattcggcatagataacaccgtactctctaatatcccatactatgaaaaacatggatatgggggtggaggaatttaatgaaaccttatatgatgaatgggttaacaagggcgacgcaccggcattgccagagactcttaaaa

SEQ ID NO: 50419 - DNA, 202 bp, Glycine max
  unsure at all n locations
  Clone ID: LIB3167-050-P1-K1-A7
gggcgnnccacgcgtccgattctgggaagagtcgaagcacaatactcattaactagaataataatcgtttggaaggttgcgttttgtttttcctagtgttccttcatatcaattttagtaattcggtgtattggtcaaacctgtgcaaacaggggaggggatgtaactttgttttcttgatagacaccaccaccttgctgtt

SEQ ID NO: 50420 - DNA, 474 bp, Glycine max
  Clone ID: LIB3167-050-P1-K1-A8
gccacgcgtacgtgaaaaaagacttgagatatcattttttgaacatggtgtgtttgctgcccgtgaaggaataggcctacgagcattgtccaaagaccaattggtcgagattctcaaaccagctgagtgcactattgttgcatcactttcaaacgattatgttgactcttatgttctgtcagagacaagcctgctcatctatccttataaaattatcatcaaaacttgcgggactaccaaattgcttctgcacattcctgtcatcctcaagttggctgatgctcttgacattgctgttaaatctgtgaggtacactcatggaagttccatttttcctggagcacagtcttttcctcaccgcatattttcagatgcaggcatatgatattgacaggttatttcagcaaccttggttctggtagcaaagcttatgttatgggtgacccttcgaagtcacagatttggcacatctac

SEQ ID NO: 50421 - DNA, 481 bp, Glycine max
  Clone ID: LIB3167-050-P1-K1-A9
gtgaaaagtgggggtgctccagttttggataaacccaaacggagaacatcagcatctgatgggggaaggtcgagtagtgtgccagataaatcctcccagcgttcctctcgcagcatgtctgtcagtcctgatcgtgttcgtgtgagggggcggtctccagcctttaatgctctagcagctaattttgagaaccctaattctaggaacctttcaaccccacctccagtaattagaaagctgtatcctaaatctgtgacaacagattctgcaatactggcgccaaaatcttctgccatagctgcacttagttcttcttttgaacaaccaccttcagcacgagaaaccatgatacctcgctcacttaaagtgagtccagtaatgcccaaatcaaaccctgagaaaaatgacaaggagaattctgtgagcaccagagtggaatctcttaccatacaggaagatgtgaaagaggatgaagttgaga

SEQ ID NO: 50422 - DNA, 196 bp, Glycine max
  Clone ID: LIB3167-050-P1-K1-B1
caagcctggtggttgttcatacatgaacttggacatagtaattaaggaggtgttgcttaattagacactgttagattgaagggttttctttttttctttttcttaatgctttaatttatcatgatagttcattgatcttctctagaattttctgcattgtagaaatggtgccctggaagtgccactttgtgttttg

SEQ ID NO: 50423 - DNA, 465 bp, Glycine max
  unsure at all n locations
  Clone ID: LIB3167-050-P1-K1-B10
atcatatagcattctaagaaatgaagagccctaccattttcattctctttctactttgtgccgtctacacctcactcctaccttcagccaccgctcaagtcgtggttgacatggaaggtaatgatcttcaaaatggtgggaaatattatgtgttgccagtaatagagtcatcatatggtggaataagagtagccgcaactggaaaagaaagatgccctctcactgttgtacaatctgccgatccgtatgataaggggattgcaacaattatttcaaccccatatcgagttcctgttatccgcgaaggctttcctttgaacattacgttcggtaattttgcagttatactgccttgtgtcccccttcgtttctgagtggaccgtcgttaatggccaaccagaaggacccgcagtttaaatttgttcgcccccaaatgcagaaaatgngttggttgaaattgagaaa

SEQ ID NO: 50424 - DNA, 504 bp, Glycine max
  Clone ID: LIB3167-050-P1-K1-B11
cccacgcgtccggtggataataatgttgataacggttagggaagcttcttcttgttcgggttgtcccctcagcttctggcttaatcgtttcaacgcaaaaccctccaaaacactcaaaacaacatccatttgccaagctagtttctctgtccaaagaagacccactcattcatggaatactcgccatctctctaccagcagtgagctagcaaattttgatcccttgggtattaactcagatttatcttctggtctgaattctacctggaaaaatctggtgtgctcaattacacaaacatttgagagtacttcaagtgcagaaaagggaaaacctaactcttctcaaggggtagcagctgcaatagaggatagttcaatagattttggtgacttttttaagggcccactgccagggaagtttctcaagcttttagggtttcttgccttgtcaaggcttggagtgtacatacccctaggtggaagtaataaggaggcttttgttgg

SEQ ID NO: 50425 - DNA, 378 bp, Glycine max
  Clone ID: LIB3167-050-P1-K1-B12
tcgaggagatttctctgtgaagagtcagtgctttttttttactactttgcttcttgctgctgcacgctcagattgctcgtgctgccacctacacagttggagattctgggggttggacctttaacactgttgcctggcccaaatgaaagctctttcgggctggtgacacacttgctttcaattatagccctgggactcacaatgtggtggccttgaacaaggctgtatatgatagctgcaagactccatgaggagccaaagtgtataagtcagggactgatcatatcatacttgccaagttacagaactacttcatgtgcaattattttgctcactgccagtcttgtatgaaaattgccatctacgctgcctgagttt

SEQ ID NO: 50426 - DNA, 486 bp, Glycine max
  Clone ID: LIB3167-050-P1-K1-B2
aagaaagtagcatagatgacaggtgggatctttggaaggaaggggcaaaagataaaggggacagtggaggtgatgccaaagaatgtgttggacttcaacgccataacctccggcggaaaaggcagcgctaaggacaccgtcaccgatttcttgggcaaaggcttggacgcattacgtgatgcaggtgatgctctcactgccttcgatggccatagcatctccttgcagcttatcagtgctactcagactgatggtagtggaaaaggaaaagttggaaacgaagcctatttggaaaaacatcttccgaccttgccaacgttgggagcaaggcaggaagcattcgatattaactttgaatgggatgctagttttggaattccaggagcattttacatcaaaaactttatgactgatgagtttttcctcgtcagtgttaaactcgaggacattccaaaccatggaaccattaacttcgttgtaactcat

SEQ ID NO: 50427 - DNA, 485 bp, Glycine max
  Clone ID: LIB3167-050-P1-K1-B3
caagtagttgagaactaagaaggagaagcaaatggctttctcaatgatctcttccccagctgggacgggtgtcaaccgtgccggtgccggcatggttgctccattcactggcctcaagtccatggctggcttccccaccaggaagaccaacaatgacattacctccattgctagcaacggtggaagagtgcaatgcatgcaggtgtggccaccagttggcaagaagaagtttgagactctttcctacctgccagaccttgatgatgcacaattggcaaaggaagtagaataccttcttaggaagggatggattccttgcttggaattcgagttggagcacggtttcgtgtaccgtgagcacaacaggtcaccaggatactacgatggacgctactggaccatgtggaagctgcctatgtttggttgcactgatgcttctcaggtgttgaaggagcttcaagaggcttagactgcataccccaacg

SEQ ID NO: 50428 - DNA, 482 bp, Glycine max
  unsure at all n locations
  Clone ID: LIB3167-050-P1-K1-B4
attcttccttgcaaagaaagaccaccattgctacacagatatatggtgtgctcttgggcaatgactgggctgcaactcatgaatttggccacaacttttgtatctcaaatgaaggtgacaatgacgccattatcatcatcgtcatcgatgtggccccggcggcatagaagaatttcgcaaaacatgcataaatgaggaggatgaggagggatatagtagtagtcagtgtaagcttcattctgtggtcttgcttagtaattacattacatttgtgtttactcttggaataggttctagtgttatgcttaattacggtcactataaatttgagacataatacatgttttattagtaattatggcttaattccactctctctctctctctctctctctctctctctcggacccaagaatttttttgtcgatcgtctttgactctattatctgatcatagntttttatatataataatttgatggc

SEQ ID NO: 50429 - DNA, 302 bp, Glycine max
  Clone ID: LIB3167-050-P1-K1-B7
cccacatctccagcgccccatctactatatccattcttacaacctcttacctccgacggcatagctttcttataatgctccctaaattcaatacacttccccactttttacaactcctcaactattaaaaccctgactttccccaacttaatcttctctcgacacatccacttttcgacagatcacctattaacaaatagaccctctacctacggcctctccaacagttccacatccttaatcaccaactgcacaccccctataatcactcattaaaccctcgatttgattaatttactctc

SEQ ID NO: 50430 - DNA, 483 bp, Glycine max
  Clone ID: LIB3167-050-P1-K1-B8
gtgaataagaagtttagtaatcattacaagtcatctattggagcggattttttaaccagggaggtgctatttgaagataggcttttcaccttacagatttgggatacagctgtccaagaaagattccaaagccttggagttgctttctatcgtggtgctgattgttgtgttcttgtatatgatgttaattcaatgaaatcatttgacaaccttaataactggagggaggaatttctgattcaagcaagtccttccgatccagagaattttccttttgttgtcataggaaacaaaatagatattgatggtggaaacagcagagtgttgtcagaaaagaaggctcgggcttggtgtgcatcaaaaggaaatattccatattttgagacatctgccaaagaaggtattaattgtgaagaagcattccaatgcatagcataaaatgccctgtaaagtggagaagaagaaaattattccctgcaacac

SEQ ID NO: 50431 - DNA, 489 bp, Glycine max
  Clone ID: LIB3167-050-P1-K1-B9
cccacgcgtccgagtagttgagaactaagatggagaagcaaatggcttcctcaatgatgtctgccccagctgttaccactgtcaaccgtgccggtgccggcatggttgctccattcactggcctcaagtccatggctggcttccccaccaggaagaccaacaatgacattacctccattgctagcaacggtggaagagtgcaatgcatgcaggtgtggccaccagttggcaagaagaagtttgagactctttcctacctgccagaccttgatgatgcacaattggcaaaggaagtagaataccttcttaggaagggatggattccttgcttggaattcgagttggagcacggtttcgtgtaccgtgagcacaacaggtcaccaggatactacgatggacgctactggaccatgtggaagctgcctatgtttggttgcactgatgcttctcaggtgttgaaggagcttcaagaggctaagactgcatacc

SEQ ID NO: 50432 - DNA, 455 bp, Glycine max
  Clone ID: LIB3167-050-P1-K1-C1
cacaaccttatggtgtatatacatggttaacggatattaaagacacctctaaagaaggatatgagttgtgaagagatatgcatcaagaaagaagcgtttgagggagaagagaagttttgtgcaaaatccttgggaacagtaattggttttgccatttcaaagctgggaaagaacattcaagtactttcaagttcctttgtcaataagcaagagcaatacactgtggaaggagtgcagaatcttggagacaaagcagtgatgtgtcatgggctaaatttcagaactgcagtattttactgccataaagtccgtgaaacaacagctttcatggttccattggtggctggtgatggaaccaaaactcaggcacttgctgtttgccactcagatacttctggaatgaatcatcacatgcttcatgaactcatgggagttgatcctggaactaaccctgt

SEQ ID NO: 50433 - DNA, 493 bp, Glycine max
  Clone ID: LIB3167-050-P1-K1-C11
cccacgcgtccgcccacgcgtccgtgcacttcacatggcagtggaagctgataatccagattgtcgattgggttacaacagtttgggtgcttttgcaaccattaaccatcttcacttccaggcttattatttggctctgcccttcccaattgagaaggcccccactaagaaaattgcaagtttaaatggtggggtgaagatatctgaactgttgaagtatccagttagaggtctcgtctttgagggtggcgatacgctggaagatttatcaaatgttgtttcagatgcctgtatatgtcttcagaacaacaacatacctttcaatgttcttatctctgactgtggaaagcaagtctatctgttaccacagtgttatgcagagaaacaagctcttggagaagtggatgctgagcttcttgacacccaagtgaatcctgctgtgtgggaaattagtgggcacatggttctaaagaggaagaaggattatgatgag

SEQ ID NO: 50434 - DNA, 466 bp, Glycine max
  Clone ID: LIB3167-050-P1-K1-C12
gggataaggatttgatacccaaatcagccaatgtgttaagagggccttcaacagccacgaccgtgatcttgcacttagccagttcggtccctcacttaagccactgtgtggaactaacaacaacacaaggccatcatcatggcagctgcttctcctatggcaagccaactcaagtccaccttcactaaaactcttgtagctcccaagggcctctctgcctcttcaccactccaccttctgccttctaagaggcaatttagcttcactgttagggccatccaatcagaaaagccaacctatcaagtgattcaaccaatcaacggtgatcccttcattggaagccttgaaaccccagttacatccagccccttgattgcatggtacttatcgaacctccccgcatacaggaccgcattgagcccactactaagagggatcgaggtgggcctggcccatggctaccttc

SEQ ID NO: 50435 - DNA, 494 bp, Glycine max
  Clone ID: LIB3167-050-P1-K1-C2
atcgagataactagaaacagtgtgatgaaaatgaaggtccttgttttcttcgttgctacaatggtgggagcatggcaatgccatgcgtacgatatgttccctctccgaatgaacactggctatggtgcccgtactccggaggtgaaatgcgcaagttggaggcttgctgtggaagcacacaacatctttggctttgagaccattcctgaagagtgcgttgaagcaacaaaggaatacatccatggcgaacaatatagatcagactccaaaacagttaaccaacaagcttacttttatgccagagacctcgaagtccatcccaaggacacatttgtgttcagtatagatggcaccgtactctctaatattccatactacaaaaaacatggatatggggtggagaaatttaactcgaccttgtatgatgaatgggttaacaagggcaatgcaccggcactgcccgagactcttaagaattacaacaagctggtgtc

SEQ ID NO: 50436 - DNA, 380 bp, Glycine max
  Clone ID: LIB3167-050-P1-K1-C3
cgttattcgtcgccacgcggcagaagaggagcgcataaaaagcacttggaaaaccctacgaagagcagcctcaggcgaagcacgacccatgcatgcaggtaagatcaagacaggagatcctcggatcacacgtgatttgcgaaagcactgagatggaaggcctggcgttcaacatcaaagataacccttaccttgtctaggcttgggggatatcagccttcctaggttggtcgaaatcaaccagacagagattgcgaaatgcttgctcgctgaccctagctggaactgcgaagagaaggcggcatgaaccagtgggctagagaagacagtaatctgggggaatgtggcttcttcgttgttgctaaacaggctgttggatt

SEQ ID NO: 50437 - DNA, 180 bp, Glycine max
  unsure at all n locations
  Clone ID: LIB3167-050-P1-K1-C4
ctgggatatagatagtatgcatataacatataccatttttttataacatacatcaaanaagagcatgcatttttatttaaaaaaacatatccaccttaaactctttcactcatactatttaatataagttctcccctcctcctaataactatcatttaatcatcttctctaagcaacttt

SEQ ID NO: 50438 - DNA, 446 bp, Glycine max
  Clone ID: LIB3167-050-P1-K1-C5
gcaaaaatggcatcattcaccatgacagcttccattcttggcggcccagccgtcaccaaccggtttgcagtagcaacgcagaggagatcactcgtagtgaatgctgccaaagctgttgaagcggaaaaggtcagttatgacaatgacatggatggtagcaatggaaggaggaacttgatgttcgccgcggcggcggcggctgctgtttgctctgttgctgggatggcagtggcagatgagccaaaaccaggaaccccagcagccaagaaaaagtatgctccgatttgtgtcaccatgccaactgctaggatttgtcgcaattgagggactcggtttttattttacttctgatgatcggaaatgtgcattagggttgtagtaatgttttgatttcacatgatcctcactgtactagatgttcataaaactatcgactttgctttgtc

SEQ ID NO: 50439 - DNA, 434 bp, Glycine max
  Clone ID: LIB3167-050-P1-K1-C6
gagagatcacatttcctgagctataggctatagccttctttaatcttataacaatggagggagccagcagccatagcacgtttaccttcatccctagcacaattgagacacctagtccaagcatccctgagatttcatcatcatcaccttcccctggcggctctcttgcaagagttgcacaaagttaccctcctggatttcccagaaaggtatttgcggaggttatagggacatttctgttagtgtttgtggggagtggctctgctgggcttatcaagattgatgaaagcatggtgtcaaaacttggagcttcacttgcatgatgactcatagtgaccgtcatgatttactcaattggacacatcttatgggcacacatttacccagctgtttcgttgcttttaccgccgtgaggcatttttcgtggccacaac

SEQ ID NO: 50440 - DNA, 319 bp, Glycine max
  Clone ID: LIB3167-050-P1-K1-C8
gtggaagctgcctatgtttggctgcactgatgcttctcaggtgttgaaggagcttcaggagggtaagactgcataccccaatggcttcatccgtatcattggatttgacaacgttcgccaagtgcagtgcatcagcttcatcgcctacaagcccccaggcttctaagtcattgaaaaatttgcaaagcatctgtagccaccccactttgtttgttgtacttaaactacattcccatttgtttttgctttatgagatttcatcatcctgtatttttggtttctgttttcggacttcaatggaaattaatggatgagaact

SEQ ID NO: 50441 - DNA, 440 bp, Glycine max
  Clone ID: LIB3167-050-P1-K1-C9
tccacgcgtccggttgttaccatttgctcccagttcttagcttaaccgagcttcacagagatgaatcggtaaaagttgatgaagatggccggttcggttagaactgggggaaagggtaccatgagaagaaagaagaaggctgtccacaagacaacaaccacagatgacaaaaggcttcagagcaccctgaagagaataggggtgaatgccatcccggctattgaggaggtcaatatctttaaggatgacgtagttatccagtttctaaatcccaaagttcaagcatccattgctgctaatacttgggttgtcagtggttcgtcacaaacaaagaagttgcaagatatactccctagcattattcaccaatttggaccagataacttagaaaacctgaagaagctaggcgagcaattccagaagcaaggttcttgaagagc

SEQ ID NO: 50442 - DNA, 467 bp, Glycine max
  unsure at all n locations
  Clone ID: LIB3167-050-P1-K1-D1
nccacgcgtncgcccacgcgtncgctntgntcactctncctcncttgcggctagggntttagcgcaggttcttctagatttaaggaagatgcgtccggaaaaggttcacatcagtattgtggtcattggccatgtcgactctgggaaatccactaccactggtcacctgatttacaagcttggaggcattgacaagcgtgttattgagaggtttgagaaggaagctgctgagatgaacaagaggtctttcaagtatgcctgggtgctggacaaacttaaggctgagcgtgaaagaggaatcaccattgatattgctttgtggaagtttgaaacaacaaagtattattgcacagttattgatgcgcctggacatagggatttcattaagaatatgattactgggacatcccaagctgactgtgctgntcttatcattgattcgaccactggtggttttgaagctggta

SEQ ID NO: 50443 - DNA, 352 bp, Glycine max
  Clone ID: LIB3167-050-P1-K1-D11
gtctcgtcactccttgatttagccctactcttttcaccgccgtggacactttcgggatgggggtagttgcttactactacgactacattctgttccgatagttataacaagatcctgatcttgaatattaatacaacactcattttaactcccttaactacttcttggagcttgaagctcatattagccacaaactactacacctaaaaatagcactatcataatttatacaccttgaagtccaacctacgcaattacatacttgcacccaatctaaaccattccgccttcaactatcacaccaaaagctgcaatgtaactctgtacaaattgcattcacagcttctaattc

SEQ ID NO: 50444 - DNA, 479 bp, Glycine max
  Clone ID: LIB3167-050-P1-K1-D12
agaatctgaaaaacaatggcggcgaagctagacacccacgccgtggcttccgatctgggcgagttcctcaacgcttctccaacggctttccacgccgtcgacgaggcaaagaggcgtttgcgtagcgcggggtaccaccaactctctgagagggaagtgtgggaactgcaaccgggcaacaagtacttcttcaccagaaatcactccaccatcgtcgccttcgccatcggcaaaaagtacgttgctggaaatggattctacataattggggctcacacggatagtccttgtctcaaactcaagcctgtcaccaaggttgttaaggctgggattttggaggttggtgtccaaacctatggaggtggtctgtggcacacatggtttgatcgagacttgactgtggcggtgagggtcatcgtgcgggaagagaatgctggttctgattcgtactcacatcggcttgttagaattgaggaacc

SEQ ID NO: 50445 - DNA, 478 bp, Glycine max
  Clone ID: LIB3167-050-P1-K1-D2
gggggtattatttgatcagaagtacaaagctcttcaaaattcttacaacagctccacggaccggcccgactgctctgctctgcaatggccgacgaggaacctgttgatcagaagagatatcttgaagagtcttgcaaaccaaaatgtgtaaaaccattactggaataccaggcgtgcattaaaaggatacatggtgatgattctgggcagaaacactgcactggacaatattttgattattggtcttgtattgacaaatgtgttgcaccgaagctattcaccaaactgaagtaatggagaaggatttgatggcttattatcgttgcattctgttctgttttcattcccagataacttcgtctaaacattcaatgttataataaccaaactatatgtcctgtatggataatattgtgtttactgtgaagttttgagcctatggagaccttagattatgatttaataagaacattatgcc

SEQ ID NO: 50446 - DNA, 425 bp, Glycine max
  Clone ID: LIB3167-050-P1-K1-D3
gtttcccaacctccattgcctccgcttctacctcgctaccatgatcattcctgagaagaaccgcaaggagatctgcaaatacctcttccaagagggagtttgctttgcgaagaaggacttcaatttggcgaagcaccctgagattgacgtgccgaatctgcaggtgattaagctgatgcagagtttcaagtctcgcgagtatgtgagggagacttttgcttggatgcactattactggttcctcaccaacgatggaatcgagtttctcagaacttaccttaaccttccttccgaaattgtccctgctactttgaagaaacaggccaagccacctggcatgccctttggcggcccatccggtgatcgccctaggggtccaccacgctttgaaagggagcgtaagtttggtggtgatcgtgatggat

SEQ ID NO: 50447 - DNA, 498 bp, Glycine max
  Clone ID: LIB3167-050-P1-K1-D4
cacacatcgttttatccgaaagcaagcattatcagaagcagaaagaaagaataagaggttggggcagagaatggcagccatggctgcgcttcagagctcaatggtcggtctctccctctcctccaactctttcttaggccaacgcctttctcccatcaccctcccctctcttcttccgggtaagtcaacagagaagcaatgtcctattgtaatgaggcttaaacgatgggaacggaaggagtgtaaaccaaacagccttcctatcttgcacaaaatgcatgttaaacttggagatacggtgcaagtcatatctggacgtgaaaggggtaaagttggggagattactaaaatcttcaagcataacagcactgttatagtgaaagatttaaatttgaagacaaagcatgtgaagagtagagaagagggggaaccagggcatattattaagattgaaggtcctatccacagctcaaatgtgatgctctactccaaagatca

SEQ ID NO: 50448 - DNA, 427 bp, Glycine max
  Clone ID: LIB3167-050-P1-K1-D6
gaccacgcgtccgagagtttgtgtgagctataacctagttaatcgttaggagaatatgaagttgtttgttttgggtaagtctgcattagttttggtagcatgcccatcccatggcgcatgctaccaaaggttccctctccgaatgaaaactggctatggtgagcgttcttcgtaggtaaaatgcgcaagttttaggcttgctgtggaagcacacatcatccgagcctttaaaaccattcctgaagagtgcgttgaaccaacataggactacattaatggcgaacaatttagatcagactctaaaacaattaaccaacaagctttcttttatgctagtgaactcgatatccatcacaacgacatatttatattcggcatacattacaccgtactctctaatatcccatactatgaaaaacattgatat

SEQ ID NO: 50449 - DNA, 443 bp, Glycine max
  Clone ID: LIB3167-050-P1-K1-D8
cagaaaccatgcagctgagcagaagtcatctgccttggttaaacaggagaatgcccgggagggaaaaccaacttccaaagatagagacaaatttcaggatcgatcctcatttccacactatcatcatgatccacccccaaagtggagacagactcttgattgtcctcatcatcttcctgttcttctccattcatctgatagtccaggtcatccaaatcatctgaagagttggcctcatcccaggaactaagggcagaaccatccaagttagaatcctcatttgaaacttcttcaaagcgggccacaagttgcggagcagcattaaggtttttgcttaatttcagagaagaagatgaagactgtacatttagaagctcacattttatctgcttctgaattttaccaaaagtaatagcttgtccagtgtataactcaacaaacct

SEQ ID NO: 50450 - DNA, 426 bp, Glycine max
  Clone ID: LIB3167-050-P1-K1-D9
cttgggagaagaggtcgagtttcacagcatctatatggtgtacgtcaaggctcataaatgagagggctacttcaagagatatcaagtcaagttcaagagaagaagagagggaaaaaccgattaccgtgccaggattcggttgattaatcaggacaagaacaaatataacactccgaaataccgatttgttgttcgctttagcaacaaggacattgttgcacaaataatatctgctagcattgctggcgatattgttcttgctgcagcatatgcacatgagctgccacgatatggtcttgaagtagggcttacaaattatgctgcagcttattgcactggtctcctgttggcccgaagagtcctcaaaacacttgaaatggatgaggagtatgaaggaaatgttgaggctactggagaggattattc

SEQ ID NO: 50451 - DNA, 409 bp, Glycine max
  Clone ID: LIB3167-050-P1-K1-E1
cccacgcgtccgtgatgaaccccacccgcaccggtctcatcctgacgctgcaggaaatgggcggcgagatcgaagtcatcaacccgcgccttgccggcggcgaagacgtggcggacctgcgcgttcgctcctccacgctgaagggcgtcacggtgccggaagaccgcgcgccttcgatgatcgacgaatatccgattctcgctgtcgccgccgccttcgcggaaggggcgaccgtgatgaacggtctggaagaactccgcgtcaaggaaagcgaccgcctctcggccgtcgccaatggcctcaagctcaatggcgtggattgcgatgagggcgagacgtcgctcgtcgtgcgtggccgccctgacggcaaggggctcggcaacgccttcggcgccggcgtcgccaccca

SEQ ID NO: 50452 - DNA, 378 bp, Glycine max
  Clone ID: LIB3167-050-P1-K1-E10
gtctagtcttcccgtgattaattattatgatgcatagggaaaagttcgcaagattgaggctggaaggcctatcgaagaggtatttgagacagtcaaaggaatttttggtccaaagaatgagaaggctgattgagcatgttcaccttcactccatggtggaaatttagaggtcatatcagtgttggctgctttttctattgtgtcacattttgttattaagtatagaaaattgtagtttatacctaagggttttacctctgtattctaatgtgttatatcttgttgactcattcattgataattgcaataaagatttgtgtgggattatttctaccaatttaaaaaaaaaaaattttttttaaatttaataaataatat

SEQ ID NO: 50453 - DNA, 244 bp, Glycine max
  Clone ID: LIB3167-050-P1-K1-E11
aaaaaaataaaaaaaaaaaaaagaatctatataaatataaaaataatatatataaggggcgaggagtaaatcgaggtacccattttatgataaactttccttccatttttgttcctctagtaggcctagtatttccggcaattgcaatggcttctttatttctttatgttcaaaaaaacaagattttttagatacagaaaacaaagtaaaattctggggttttttattccccaattataatact

SEQ ID NO: 50454 - DNA, 491 bp, Glycine max
  Clone ID: LIB3167-050-P1-K1-E12
gttttacaacctagtgtttaaatacaaagaagcatggaagaagcaactttatgctctgagtggaagaatcatagaactctagtgttgtaggaaccacaactagggcatttgtggtagagccagtggaagggggtctctcctttcttttcacaatcattacataataaaacctgagtttgactagaaatctcatcagaaattctctcttcagccaacaacgcatctaacatcctaaaatatacctgcatgtctccaagtgacttgctacatattgggcaggtataattaaagcaggtatattcctgaaaacatgttgagtgcattacatgaccacatgggagggcttttaccggagagcaggatgtgaagatatattcatgacaaattggacagttgtcctctaaatgtttctccctttcatcatcaaataatttgcagatcctgcagttatattttgccatcgataaattacatgaaatcgttgagcatgt

SEQ ID NO: 50455 - DNA, 495 bp, Glycine max
  Clone ID: LIB3167-050-P1-K1-E2
tgccaatggcattctatccgtcactgctatcgacataggcacagggaagaaacaagatattacgcatggtggtgctagcaccttgccttcagatgaggtggagagaatggtaaacgaagctgagaaattttcgaaggaagacaaagagaagagggatgctattgacacaaagaaccaggcagactctgtggtataccagacagaaaagcaattgaaagagcttggagacaaggttcctggccctgtgaaagagaaggttgaagcaaaactaggagagcttaaagacgccatttctgggggttcaacccaagctataaaggatgccatggctgcactaaatcagggagtcatgcagcttggtcagtccctttacaaccaaccaggagctgcaggcgcatgaaggccaacaccaccacccggtgccgactctggcccctcagaatcctcaggcaagggacccgacggtgatgtcattgatgcagatttcactgactc

SEQ ID NO: 50456 - DNA, 204 bp, Glycine max
  Clone ID: LIB3167-050-P1-K1-E3
gtgtcttcccttttccaaatttggcatgtagggtttaaggaggttgaggttagtttctactaattaggaaagatatgagatgacatggtttcagctgagaaaactacctttttgatatatttatcaaattcaatatagccttttatggtttgaactttgaagtgtattttaccttcaagtttattgtagtttgtaatgcataat

SEQ ID NO: 50457 - DNA, 506 bp, Glycine max
  Clone ID: LIB3167-050-P1-K1-E4
catttgtaaatgactaaatggcaatgagctcaattcataccttgtacgctttttctttccgggtgtggttcccaaattcatctccacaatttaagcctctgaatgccattccactaagaagaacaaaacactacaacaacaacaacaacaacgttaaatttccccgagaaagaacaaggaccagagcaacccttgatgatgttgaaacagaccaactttcctcaatcccacttgttgaaaatgagaaagccaaaaaggatgtagaggaaagtgtgaaagtgttaaaagatgcagctaagacaagaaaggtagcagcagaggagattctttctgcattgtctatcattgagaaagcaaaagttgatccttctgccttttttgaaacccttggtggaaaggaatcccctgggaggacctggatgctaatttttactgctgagaaacaactaaaaggtggtcgatattttcctctcacagcttgtcagaagtttgatgctgctgcaaag

SEQ ID NO: 50458 - DNA, 465 bp, Glycine max
  Clone ID: LIB3167-050-P1-K1-E5
tcgaccacgcgtcccgctgcctggcctttaaggatccaaaccttttcccaatgaggaacctctctttcttcttctgcttggtgcttaaccttcttcgccgccgtcagatctgatccctcagatcaccgttacaaagaaggcgaccccgtccctctctacgccaacaaagttggcccctttcacaaccctagcgaaacctaccgttacttcgaccttcccttttgtgaaccaggtgatttgaaagagaagaaggaggcgctcggtgaggtgctgaatggggaccgtttggttagcgcgccatacaagctggagttccagcgcgacaaggagttggtttccgtgtgcgacaggaagctctccaaacaggacgtggctcggttcatatccgcggtgaggtaggactactacttccagatgtactacgacgacctttctatatggggctttatagggaaggttgacaag

SEQ ID NO: 50459 - DNA, 486 bp, Glycine max
  Clone ID: LIB3167-050-P1-K1-E6
cccacgcgtccgctagaaacagtgtgatgaaaatgaaggtccttgttttcttcgttgctacagttggggtagcatggcaatgccatgcgtacgatatgttccctctccgaatgaacactggctatggtgcccgtactccggaggtgaaatgcgcaagttggaggcttgctgtggaagcacacaacatctttggctttgagaccattcctgaagagtgcgttgaagcaacaaaggaatacatccatggcgaacaatatagatcagactccaaaacagttaaccaacaagcttacttttatgccagagacctcgaagtccatcccaaggacacatttgtgttcagtatagatggcaccgtactctctaatattccatactacaaaaaacatggatatggggtggagaaatttaactcgaccttgtatgatgaatgggttaacaagggcaatgcaccggcacttgccgagactcttaagaatacaacaa

SEQ ID NO: 50460 - DNA, 312 bp, Glycine max
  Clone ID: LIB3167-050-P1-K1-E7
atttggaagggagggtgcatcataagggccgtgttcttggaccggatcaagaaggctgatcggaggaaccctaatttggcgagtttgattgtggacccggagtttgcaagggaaatggtgcagagacaggctgcgtggaggagggttgtggggttggcggtttcggctgtgattagtactcccggaatgtgtgccagtcttgctttactttgatacctatttgagggcaaggctgacggcataccttgttcaggtttttaatggacttgtttggtgcgcatacttactagagggtttatttcccttgagctt

SEQ ID NO: 50461 - DNA, 483 bp, Glycine max
  Clone ID: LIB3167-050-P1-K1-E8
caagtagttgagaactaagaaggagaagcatatggcttcctcaatgatctcttccccagctggaccactgtcaaccgtgccggtgccggcatggttgctccattcactggcctcaagtccatggctggcttccccaccaggaagaccaacaatgacattacctccattgctagcaacggtggaagagtgcaatgcatgcaggtgtggccaccagttggcaagaagaagtttgagactctttcctacctgccagaccttgatgatgcacaattggcaaaggaagtagaataccttcttaggaagggatggattccttgcttggaattcgagttggagcacggtttcgtgtaccgtgagcacaacaggtcaccaggatactacgatggacgctactggaccatgtggaagctgcctatgtttggttgcactgatgcttctcaggtgttgaaggagcttcaagaggctaagactgcataccccaac

SEQ ID NO: 50462 - DNA, 276 bp, Glycine max
  Clone ID: LIB3167-050-P1-K1-E9
cccacgcgtccgcggggttgaggttgattctcgttatgaggttcttctaattggaacagttggactggtgatggggttttctgggaggctttatgaagtgggttcttctgcgcagtgcattcaggggaataggaaggtgctctttgcgctgcattctgagtttttgaagctggagagggaggctgcgaattcggggtttgagtttgtgattcctgatgttgttgttgatcatgatgaggaggaagtgtcctaattgttttctttgttacctgttgg

SEQ ID NO: 50463 - DNA, 369 bp, Glycine max
  unsure at all n locations
  Clone ID: LIB3167-050-P1-K1-F1
accacgcgtncgcaacggcttcatcaacgttgctttcgtagctgatggtggcgatcgggaagaacaagaccacgggagagacgaccgtagtagaagctcctgggctgaagacggcttccaggatcaacaagatcacgctcttcctcatcaccaacacaaggaacaatatcgtgctcagtacgaggagccccaatctcaaaggtgctacaaaccccagaaggtggatgaaggtgaagatggatggcagactggtggttgaaaggcttcaaggcatccacatatggttcaaagggacaactggaacagctataaacgacgctgtgcttagcaagaatactctcatgaggttgtagttggtgctgatgcgga

SEQ ID NO: 50464 - DNA, 473 bp, Glycine max
  Clone ID: LIB3167-050-P1-K1-F10
cacaaacccaaccctttctcaactccttcttactccttgccccttctcagatcgcctattgtcttaagtcccaaaacacaaaccctaaccctaaccctaaccttagctattcgaattccactcctcttcgcgaaatcatggcgacgactttggtgagctccgcgggtgggatgcttgcgatgcttaacgagccacatctctcgctgaagcttcacgctctctccaacctcaacaacttggtctacaccttctgtcccgagatctccaccagtctcccgaagatagagagtttgcatgaagatgaggagtttgatcaacatcaaaggcaacttgctgcacttcttgtatcaaaggtcttttattacttgtgtgaacttaatgattcgttatcttatgccctaggagctggtcctctgtttgatgtctcagaggattctgactatttgcacactcttcttgctaaaaccatatat

SEQ ID NO: 50465 - DNA, 464 bp, Glycine max
  Clone ID: LIB3167-050-P1-K1-F11
ctcttctgctctcactatatcctcttctttcacccttcttgatggcaaggctccaaggcagggaccagctgcttcccctcaatgtgtgagcctcccccctccccctttgcactctcagaaccgttcatggaagaccactgcttattgtcgcaaggttgctcgaaaagttatggcaatggccacaggagaggcaccagctgaagctaccccaactgaggtgccagagattgtcaagactcttcaagaaacttgggacaaagttgatgataagtatgcagtgagttcacttgccttggttggggtgattgcattgtggggctcagttggattgatctcagcaattgataggcttcctttgattcctgggattcttgagattgtaggcattggatacactgggtggtttgtatacaagaacatagttttcaaacccgacagggaagctttggtacggaaagtaaaag

SEQ ID NO: 50466 - DNA, 469 bp, Glycine max
  Clone ID: LIB3167-050-P1-K1-F12
cccacgcgtccggacgatgcggcgcatgttcgccggagaactcggccccgaccgcggggtcgggatctacagccgccacttcaacccgacggtgctgagcctcagtcgcctcatggccgccctcgaaggcaccgaggccgcctactgcaccgccagcggcatgtccgccatctccgccgtcctcctccagctctgcagccacggcgaacacgtggtcgcctccagaactctctacggtgggacccacgcgctcctctcacactttctcccgcgcacgtgcggaatatccactagcttcgtggaggtgacggatcttgacatggttgatgctgccatagtagaagggaaaacaaaagtgctttacttcgaatctgtttccaaccccacccttacggttgcgaacatacctgaactgtgccacatggcacaccggaagggagtgacggtggtggtggacaacacgttcgcg

SEQ ID NO: 50467 - DNA, 482 bp, Glycine max
  Clone ID: LIB3167-050-P1-K1-F2
aagtagttgagaactaagaaggagaagcaaatggcttcctcaatgatctcttccccagctggggccagtgtcaaccgtgccggtgccggcatggttgctccattcactggcctcaagtccatggctggcttccccaccaggaagaccaacaatgacattacctccattgctagcaacggtggaagagtgcaatgcatgcaggtgtggccaccagttggcaagaagaagtttgagactctttcctacctgccagaccttgatgatgcacaattggcaaaggaagtagaataccttcttaggaagggatggattccttgcttggaattcgagttggagcacggtttcgtgtaccgtgagcacaacaggtcaccaggatactacgatggacgctactggaccatgtggaagctgcctatgtttggttgcactgatgcttctcaggtgttgaaggagcttcaagaggctaagactgcataccccaa

SEQ ID NO: 50468 - DNA, 288 bp, Glycine max
  Clone ID: LIB3167-050-P1-K1-F3
ctgatcgcgagggccgacctttttttttttttttgtattgcgctatatttgtgaactagtgtggatgtggaatatgaacatcctagagaggcaacaatcataaaatcatccctgcctcgaaaaaaaaaataaaaaataaataagaataaaactaaactaaaaaaaaataaatagcacaagaataaaaagaacaaatcacttatttctagcattgaaaacaccacatattgcatgcaggtctactgatactgaaaaaccattagaatcctaccctaacttaaggatatt

SEQ ID NO: 50469 - DNA, 452 bp, Glycine max
  unsure at all n locations
  Clone ID: LIB3167-050-P1-K1-F4
tctgaatcttgttcctgcctgggaaaacaacgattctatcatatgaatcagcgctgtttggggttggctcctactcctacaccctgaattgaagcccgcctttgttttcctccaattcacttcttcgctagctcctgcttccacattccctttcccggattcgaactataatggcttgtgggagtaagagcgggaaaagtgagatcagtgaaggaggtgcaaatgattcagtggctgtgggagatgtgatatttgtcaagcttcgcggtagctcatggtggcctgtacaggttgttgatgaaaatagtgttaataagagtgttaaaccgagcaaacggaccaaacgattgccgggagacatccttgttaggcattatggaagctatacatactcatatgctgatcctatttaatgtcgtgatgagtttaagaggatactngagcgtaatgat

SEQ ID NO: 50470 - DNA, 418 bp, Glycine max
  unsure at all n locations
  Clone ID: LIB3167-050-P1-K1-F5
cccacgcttacgtggttttttaccttgtaaggatttttgtttattccactatcaacaacaaagttggtagctgatgcatttggagggactttacctaccaagcaattatttaaaagtcttgttctgaccatattaatccccctaattttgggaaaggttctacgtgaatcttttaaaggtgtggctgactttgttgacaaaaaccgcaagcttttcacagtgatcagtgcacttttccttagcctagtaccttggacacaagtgagtaggtcaaggtcattgctgttaatggtgaagcccaatgtttttcttgtagctattggactgggaacgcttcttcatctgnctttattggtatttaatatccttgctgtcctgggactttcagttatcttcgggggtaaaaattcaatttttt

SEQ ID NO: 50471 - DNA, 393 bp, Glycine max
  Clone ID: LIB3167-050-P1-K1-F6
cccacgcgtccgcccacgcgtacgcccacgcgtccgatttttcttcctcagtagtgtcatttgggcggatattctctgcagcaactatgcctaaccctaaggtcttcttcgacatgaccatcggcggtcaatctgctggccgaatcgtgatggagctttacgccgacgttactccccgcaccgtcgagaacttccgagcgctttgcaccggcgagaagggcgtacggcggagcggcaagcccctacactacaagggctcgtccttccaccgcgtgatcccgagtttcatgtgtcagggtggcgacttcaccgtcggaaacggaaccggcggcgagtcgatttatggcgccaagttcgccgacgagaacttcgtgaagaagcacaccggtcccg

SEQ ID NO: 50472 - DNA, 478 bp, Glycine max
  Clone ID: LIB3167-050-P1-K1-F7
cccacgcgtccgatttaggctctcttaaaacaaatgtccctcaaaccactttccccacactctttagtgtgtcatttttttttttgctctttccccacaaagaggtcttggacccttcttctgtgtagtgcaatggccatggctaaggttttctgtgttctgcttctggcactccttggcatttccatgatcacaactcaggttatggcaacagattctgcttatcacttggatggaaggaattatggacctgggagtctcaagagctcacagtgcccttctgaatgcacaagaagatgtagccagacacagtaccacaagccctgcatggtcttctgcaaacaatgctgcaaaaggtgcctttgtgttcctcctggctactatgggaacaagtctgtgtgcccctgctacaataactggaagaccaagcgtggaggacccaaatgcccctgaaaattgaaaatataagcataatttc

SEQ ID NO: 50473 - DNA, 485 bp, Glycine max
  Clone ID: LIB3167-050-P1-K1-F8
ccaccccacatctaaagccacttcctagtccacacacactttgcctactctagtgtctgattgataggcccaagagcaaagaaactaagaagattttgagcacaatggcatccacacaatgcttcttgcaccaccatgccctcaccactccaaccagagcttcattacagcgcttagttgtgagcaccaaaccaaaccacattgtttgcaaggcacaaaagcaggttgtccaagagggtgaggacactactaacattgtctctcgcaggttggccctcactgttctcattggtgctgctgctgttggctctaaggttgcacctgctgatgctgcctatggagaagctgccaatgtgtttggaaagccaaagacaaacactgacttccttccatacaatggggatggattcaaactctcaattccctcaaagtggaacccaagcaaagagggtgagtacccaggtcaggttcttagatatgaggac

SEQ ID NO: 50474 - DNA, 489 bp, Glycine max
  Clone ID: LIB3167-050-P1-K1-F9
cccacgcgtccgcccacgcgtccgcccactcgtccggatccccatcatgggaactatggttggtcctcactctctctctccactcctcaacatcaaaccttcaccctcaagaattctcttggctccctctccgcaacccaagtcaaattctctcttttgctcgaaacccattgtttctagtctcagaaagaaccaaactttatctcctaaaccttcatcaggcacaagctggttggctcatgctcaacaaggcctagcagctttggctatctccttggcactcaactttagcccagttttgttcaatggcaatgcactggcatctgagtttgatgtacttaacgagggtccacccaaagattcttatgtgtttgatgatgcaggagtgcttagtagggtaaccaggtccgatttgaagcagttgttgtctgatttggaatcaaggaagaacttcccgatcaattttataactgttcgaaagctcacgag

SEQ ID NO: 50475 - DNA, 99 bp, Glycine max
  Clone ID: LIB3167-050-P1-K1-G1
ctcactctttccagcggatgcatgcataactgcttgcggcgaagccgccttctcactaatgtcccctggttcatttcctcaatcgggcgctaagccacc

SEQ ID NO: 50476 - DNA, 407 bp, Glycine max
  Clone ID: LIB3167-050-P1-K1-G10
cccacgcgtccggtgaaaaccgtgttcatgtaagtaatcttgcttggggtgttgacaggggggcacttaagtcattgtttcgtgaacaagggaatgtcttggaagctagggtaatctatgacagggaaagtggacgatcaagaggctttggatttgtgactttcagtagccctgatgaggtcaacagtgcaattcagtccttaaatggcgtggacttgaatggcagagctatacgagtctcattagcagattccaagcccaagcagttctgaggatttagcttttcgtctatacccgatagaggatttcggtatttgggacttgggagttatacagctgcaagatgtcattggcaaaaacagtttgggaaagaaatacacttacatgcattgagactacatgtacac

SEQ ID NO: 50477 - DNA, 412 bp, Glycine max
  Clone ID: LIB3167-050-P1-K1-G11
cccacgcgtcctgacggacaaatcgaaggtaattttacaaatgaccaccgaacacaagagcgagagagttgtcgaccttaaagaccagcttgacatgcttagccttcagaaatcggttcacaccgagttcaagaacatcgaatacgaccatatgcacatgaggattgctcgcatgcttactgagaagcgtgtaagagaaatcgacgatggtatcaataagaggttccacagatagctagacacaaaacggtagaaaagcatagttgtaagaccacctccatctataaagaagctctctacagcaagaatcagcagcagaagctccatacactgaaaaagctgtatgtgcctacacatctatatgcaagctacagagttcaatggtgaaaattatagatcagtcataattatc

SEQ ID NO: 50478 - DNA, 87 bp, Glycine max
  Clone ID: LIB3167-050-P1-K1-G12
cccacgcgtccggttatatggtggcggataagacaaatgttgttgagtttcgttttaggtagagattgaattctcagttttgatttg

SEQ ID NO: 50479 - DNA, 472 bp, Glycine max
  Clone ID: LIB3167-050-P1-K1-G2
cccacgcgtccgataaaatcaaatcaggagagcatgcatatgaacatgatgatgaagaaggtgtgtgggtttgcaatagtgatggtggcagtgcaccttctggtggaggtgagtcccaaggcagaggctgtgacttgtacccctgtggagctgagtccttgtttgggggcaataacttcctctcaaccaccatcaacaatttgttgccagaaggtgagggaacaaaggcaatgcctctgtggttacctcaaaaacccaagtctaaggccatatgccaattctcctggctccagaagggttgctagctcttgtggggttccctttccaacttgttaattaccttcatatcatatcatatatagtatgtaataaaccctgttggctggaaattatatatatatatatataagaatgatatcagtcagtattgcagaataagaaaatgatcgatgctagctagctgtttaagagt

SEQ ID NO: 50480 - DNA, 502 bp, Glycine max
  unsure at all n locations
  Clone ID: LIB3167-050-P1-K1-G3
cccacgcgtccgcccacgcgtccgggaatatattacaagcctccccaattggacgggctttatgaatgtctttcaacagtgtttgcaactgatttgcattctcgtgcatttttacggcttcctaaatctgtgggtgtggattttcgtgcctcgtgtttctgccataagcaaacaattgacatgggctatgtgtgttctgtatgcttatccatattctgtgagcaccatgataagtgttcaacctgtgggtctgtatttggccaggctcaactagatgcctcagcagccgaccggcaaagaaaggcttgatgcattatgttgcatctgagtgcataacatattttgtcacatttatcaagagagctgatcgattaaagttcttttcatacctgtagcataatgaaattttgaaatcaaatttcttttgcatctgtcttagtgggaaactaagnttgtcatggaaattattggaggcctataaaaagtcagcatcgatctgaag

SEQ ID NO: 50481 - DNA, 368 bp, Glycine max
  unsure at all n locations
  Clone ID: LIB3167-050-P1-K1-G4
cagaagaagaggaacgtanacggagaaagagtaggaagattagaagaaaaagaagtaacaggagcaggattaagagaagatatagcgattcacatgagagtgaagagagcgagagcgatgactctgaaagcagtggaagaaagaagaagaaacgttcctcttcttctaggtctcgatcgaagcgtatcagaaggagcagcaaaagaacaaagggaagctctgaaactgagagcgcgggttctggttcggaggaggaggagaatggttctggtgatgccaagagtaaagcaatggttgatgaggtgaagatgacggagattaacgcggaggctataaaagttgaaggaattgtttgagtcttaaaagaa

SEQ ID NO: 50482 - DNA, 283 bp, Glycine max
  Clone ID: LIB3167-050-P1-K1-G5
gcgagacatgaaaaagcggcttgtgcagctgtaatccccatttacgaacggccatggacatgggtcgagccttatctggaaacccatccagaacataacgtagacccactgggacaccgcgtgtccactgccataaaacaatgctataaagactatgcatggcaaagtcatctgctccactagcggcaggacctttacaggaaagatggtacgctttgcacagtaccgacagtacatgatgaacgtatggctatagatgattgaccgccacctcacacactat

SEQ ID NO: 50483 - DNA, 492 bp, Glycine max
  Clone ID: LIB3167-050-P1-K1-G7
cccacgcgtccgatcctcttgatcttcttcctccaagcaagatgatcttggatgagtggaagagactctactcaaacaccaagaccaacttccgggaggttgcaatcaaaggattttgggacatgtacgatccagagggatattctctgtggttctgtgattacaaatacaatgatgagaactcagtttcctttgttacattaaacaaggttggtggatttcttcagaggatggacctggctcgcaagtatgcgtttggaaagatgctggtgattggatcacaggcaccatttaaggtgaaggggttgtggctcttccgcggccaagagattccacaatttgtgattgatgaatgctatgatatggagctctatgactggaccaaggttgatatctctgatgaaactcagaaagagcgcgtcaatcagatgatcgaggattatgaaccatttgagggagaaccttttttggatgctaagtggctcaagtgag

SEQ ID NO: 50484 - DNA, 498 bp, Glycine max
  Clone ID: LIB3167-050-P1-K1-G8
aaaaaccttcccttctcttctcacccccacactcccatctcacacacccctcgcatccgacagggtctctcaccattccctccaacctctccaagcccgccgccctccgccccaaactaagcccaaagctaaggtccgccgccacaaccaccatcgtctgcagcaccaccaacaacaacaacaacaacaacgtgtcctccgacctgaaggcgttctccgccgcgctggccctctcctccatcctcctctccgcccctctccccgccggcgccgacatctcggggctcaccccatgcaaggagtcgaagcagttcgcgaagcgtgagaagcagtcgataaagaagctggagtcgtcgctgaagctctacgaggcgggcagcgcccccgcactggccattaaggcgagcgtggagaagacgaagaggaggttcgacaactacgcgaagcatgggttgctgtgcggccgccatgggttgccgcacctgatcgtgagcggag

SEQ ID NO: 50485 - DNA, 475 bp, Glycine max
  Clone ID: LIB3167-050-P1-K1-G9
cccacgcgtccgatcatcttcattactgatctcaacatgacatgtagtctagtgttatgaatgttttaaaacacttgattatgtgtcatgtaggcattagtcggaatgatagacatcgaacatcttggattacctaataatttttccatcatctcctactttaagaatttctaattattatcgtttccttgatttgcttgtgtatttatttgttaatgatgccgttgctaggtagaagtactaaagtttggggtaagagaggtttgttgatatttaattatgtgtgatgacccttgagcgagacgtgactatgaattgtttcaacttcttttgttaaataataatatgaggaatgaggaatggcggggcatgagaactgagaagggggtcagtgaaatgaaatctgtgaatgatgtaactgatgtagacttcgaaatcaatgtctttgaattttgtttttaaaattcatcaatgc

SEQ ID NO: 50486 - DNA, 442 bp, Glycine max
  unsure at all n locations
  Clone ID: LIB3167-050-P1-K1-H1
cccacgcgtccggataatgaaagcgtagttgaaagcaactactgaaatcgagagggagacgaggaggttagatcgagagagatgggaaaggagagtagcaaagatacggttccggtgacgcagtggctgaatcgaatggtctcagaaccttactacctcttacatttattaaccttcttgtgctatttagtcgttcgcagctccgcaacccaaatcttagcgcctcatatcactcaccatctccttcgtcgcgaaatacaaacactgctagtgttcgcgatattggctctcatcaagggaataaaagaagaaacatgggaagcctttatagctgatgtgcttttactggccaagatttgtctttttctactagcctttacaatggatcgncgcttagccgattggcatattcttgtatctttagtgatacatatgttaacac

SEQ ID NO: 50487 - DNA, 468 bp, Glycine max
  Clone ID: LIB3167-050-P1-K1-H10
attttattgctacttttctccatcacctaaaaattgtgcactagtttcatgctatgggtccaccgcctctgctcaagcctcaccaagtacccctcaccactccattccctcttcctcaaacccatcacacagcatcaagaaacaagagggtccacagcaccagcaaattcggaaactttcttgacttcaaacccgagaacaaacccgaatccttagattttgaccttccatggtgccacccttctgaccgcaatcgttttgatgtgatcatcattggtgctggccctgcaggcacaaggctcgccgagcaagtgtccctctatggagttaaggtttggtgtgttgatcctgaccctctttctgtgtggcctaacaactatggtgtgtggagagatgagtttgagagccctgggcttgaggattgcttggaccaaacatggcccatggcttgtggttatgtggatgatg

SEQ ID NO: 50488 - DNA, 236 bp, Glycine max
  Clone ID: LIB3167-050-P1-K1-H11
tgaagattccgcaacagagagtagaaaagatggctcggttgatcacagcggtgtggtgcgcggtggctgtgctactgtgcgccgctgcactcgcatcgtggttggaggaagcggccaaccctatacgaatggtggcggaggtggaggaccgaagaattcaggtgtagggctgtgccagcacaggctggagacaagagtgtttactatcattttcaggatctagtccccactactgg

SEQ ID NO: 50489 - DNA, 485 bp, Glycine max
  Clone ID: LIB3167-050-P1-K1-H12
gcgtccgttggaacttttactctcacacatgtctgcttctgccttgtttcaaccatggtagcttgcttctgcttctggtggccactgagatgatggggccaacaatggtggcagaagcaagaacttgtgagtctcagagccaccgtttcaaggggccatgtttgagtgacaccaactgtggctctgtttgccgaaccgaacgtttcactggaggacactgccgtggcttccgtcgcagatgcttctgcaccaaacattgttaattttaaaaaattaattaagagtgctttgatagaagatgatagatctatcatctttctactcgtgttgttaattaaccactttgtgtttgagaataagggttacccattctactatgggtttctttgtttgcctcttattttatctagcttgagatccttttattaaaccgagtgttcagtgagaaggaattattttatcttggttgttaattaaatattttt

SEQ ID NO: 50490 - DNA, 452 bp, Glycine max
  Clone ID: LIB3167-050-P1-K1-H2
aaaaaaataaaaaatggggataggggtactatttgttgggtttttcttgctatcttgtgttgagtgtgtgaagggtgtggagccaaaagcctcacccacttgtacattttcggcagtttacaactttggggactcaaactcagacactggaggcatatcagcttcatttgtgccaattcctgcaccttatggcgagggcttctttcacaagccttctggaagggactgtgatggccgtctcattgtagatttcatagctgagaagctaaacttgccatacttaagtgcttatctgaattcccttggaaccaattaccggcatggggcaaattttgccactgggggatccaccattaggaagcagaatgaaaccatatttcaatatggaataagtcctttctctcttgacattcagattgtgcaaattaaccaagttaaagcacgcaccaaac

SEQ ID NO: 50491 - DNA, 200 bp, Glycine max
  Clone ID: LIB3167-050-P1-K1-H4
gtttggtcttattgatggtgtcctggaaactgagtattgtatacagtttatttgcaggatatatcttagaggttgaaaatgctaatttttgtcaaattgatattgcagaatttcattcgttaatgataatttgcaaatgtggaggattgtattttcttcttagttccccaaaattatgctattgttgaaagttaacttcc

SEQ ID NO: 50492 - DNA, 247 bp, Glycine max
  unsure at all n locations
  Clone ID: LIB3167-050-P1-K1-H5
attccggcccacgcgtgcgttttgttcttatttatggtnttctgcttactgattttttttttcagcacattngcacgatatgccggggatgttttaaatgctcatacccctcaccccgtatctccacatttccattctcctatacccattacacaaacatcaaaaaacatgatggtccacagcaccacccaattctgtaactttcttgacttcaaacccgcgaacaaacccgaatccttagattttg

SEQ ID NO: 50493 - DNA, 362 bp, Glycine max
  Clone ID: LIB3167-050-P1-K1-H6
tttcgacccaggcgtaccgcccacgcttgcacccacgcgtccgtttagctactactggagcaaactttgcaagagcatacagcggggaattcggtagttgcaagttccctgagaacttcactggttgccaagatcttgccaaacaaaagaaagtgccattccttagtgacgatttggagcttgaatgcgaaggaaaggacaaatacaagtgcggttctaatgttttctggaaatggtgaaaggaggcaaccttttatgcccaactgcgaattattcgctttgcgatgtacctaactgcttgaatatataccatatttttctgcattgctttcagttattatattgttggtgttggattttta

SEQ ID NO: 50494 - DNA, 353 bp, Glycine max
  Clone ID: LIB3167-050-P1-K1-H8
caaaaaatgaagagcactaccttgttcgctctctttctactttgtgccctcacttcatgatacgtaccttcagccaccgctgatgtggtgctggacatggatggtaatcctcttggaaacggttggcaaaatgaatatttcatgttgccagttacaagaggaagcggtggtggaatagcactagctgcaactggaaatgaaagatgccctgtaactgtcgtgcaatctaacattgagcgcgatagggggtatgcggcaactttaaaagctcaattcaacctccttttaatggaaaaaggccttccttggacgattcaatccgatacctttgaagggttaccggggggggtccc

SEQ ID NO: 50495 - DNA, 438 bp, Glycine max
  unsure at all n locations
  Clone ID: LIB3167-050-P1-K1-H9
cccacgcgtccgtccacgcgttcgcccacgcgttcgtagaaacagtgtgatgaaaatgagggtccttgttttcttcgttgctacaattttggtagcatggcaatgccatgcgtacgatatgttccctctccgaatgaacactggctatggtgcccgtactccggaggtgaaatgcgcaagttggaggcttgctgtggaagcacacaacatctttggctttgagaccattcctgaagagtgcgttgaagcaacaaaggaatacatccatggcgaacaatatagatcagactccaaaacagttaaccaacaagcttacttttatgccagagacctcgaagtccatcccaaggacacatttgtgttcagtatagatggcaccgtactctctaatattccatactacaaaaaacatggatantgggtggaagaaattaactc

SEQ ID NO: 50496 - DNA, 447 bp, Glycine max
  Clone ID: LIB3167-077-P1-K1-A1
cggaaaaaccgggccggaccacacccttccaattggaaccacccctaattggggttggccctccaaagtccgccccatataaggaaatgcggcgaagaactgtaatggcagggggaactaatgaaaatctccttccgaagtttgggaccaaaaccaacctaacaccaaaaagggactattatagttccggggtgctactacttgaaatagtaagtggtcgaaaaccttcacagtcgttgtattaaatcggatgtctaaaactatttaaatggctacccccttttttgcaatgtaattgttttaattaacttttgaactctaaaaaaatatcttccttttctaataaaatccctagggttattccattttaaaaagtttaggacttctttttttttcctcaccaattttttccctatttttcctcttaaatatttaataaatttattt

SEQ ID NO: 50497 - DNA, 433 bp, Glycine max
  unsure at all n locations
  Clone ID: LIB3167-077-P1-K1-A10
cccgnccggaatnccgggcggaccacagccgtccgccaacgcgtccgccaaaccaaaccaaaaagtgtgggggggaaaggggaaccaaaaaccggagcaccattggcaccatttagggttcctaagccttttccccccgtggcagatgatggggggcagttccgaaaggccttttaaggtgggggaactaacggggggctgatggtttcgacctgggttaataggaatgctgttcaggggaggctaataagagaaactaatgcccagccctatggggaaaatctcttaagggcctgggccaaagaactaacaagggattttggggggttggttcattttgggccactggattctgctgaacgtgatgcatttttggcaaacgaggcgactaaaaaatggccttcaagcaatcaggtcctgggggaaatagcct

SEQ ID NO: 50498 - DNA, 457 bp, Glycine max
  unsure at all n locations
  Clone ID: LIB3167-077-P1-K1-A11
gggcccgaaancccggggcggaccacacccttccggttggtaatgaaaaatgaggatggtagtttttatttaagtaagtttaatctgaaacggggggttttaatttttaatactttggaaccaaaaaatttaccacccaagggccaccataatggttttttcctaatcaactgggcttttttttgaatccttttcttacctcctccaattttaaaacctttttacttggggcctttttttttttttttccttttcctcctcctccttttttttataaattcttccttttttttaataatacactttttaaaattttacacattttgccattaatgctgctttaagaataagtgccagccccgccaaaaagaaaaaggtgttaatggtaaataccaacagcggcggccatgccataatgggtttttactttgcaaagagactttttggggctggccat

SEQ ID NO: 50499 - DNA, 444 bp, Glycine max
  unsure at all n locations
  Clone ID: LIB3167-077-P1-K1-A12
gggncgggaattccggggcggaccacaggcgtccggccaaattggggcacgggaatgggagcggttattcagaaaccatgggccgtggcattgggaggaggtttttcaattaagccgggtttttaattaaacaccaggggttgggttgggggttaaccagttggaaaataatcggggttgggggatggggctgttgccactcaacgttttaggcaaactggggtgggggcgcaccagcgacctacatggttccaaggactggatccccaacttaatttggagggacctttggttggagatttggggttcgaccaatttggacttgcaagggatccggcaggttaaagggggtttgtgcaggcagggctggttaatggccgttttgcaaggctgggggttttgggaattttagggccagatctacttcgggtaacaggaattagt

SEQ ID NO: 50500 - DNA, 475 bp, Glycine max
  Clone ID: LIB3167-077-P1-K1-A2
acccgaaatgtccgtgggcggaccacacccgtccggttgaccatggcggttgctttaccaagtccaggtgcaccactgaaactgtaaaatgttggggggggcaaaggtttgcagttgcgtaggtgtaaccttaatcttaataagctgaaggttttgggggggtttgggggttgtcctgaattgccaggggtttggtaaaaaagaaaaggaattggatggttagggttccgacattggcgagattatctattttctttgtatggtatcttttcggccaatgcttcctaactgtgtttttaaggcggctttatttgaatttccggtgtttaggtttattgtgcgtttatttatcttttttttaatttctctttttctctaaaatttgtttgtaattttttttccctttttctctaattttaaaagtatttttttatctgtatctctatttcttttctttttttttaagtttttttta

SEQ ID NO: 50501 - DNA, 357 bp, Glycine max
  Clone ID: LIB3167-077-P1-K1-A3
ccacacccgtccgccaacgcttccgcccacccttcctaaattccggccagataaagggtttccgcctttggcttttctttttgtggaaggcggaccccaaatttttccttaacgaaccttaattaatttttccaattcgaaatttggatcaccttttggattaaacctttttttcctggttaattttttggttcgcctggaccataaaggggggggatggaaatggaatcctaaagatgccagttccagcaggaggggttcgcatgcctgcgaccaatagggttaacagaagggcagggcttaaaacccatggtttatggcaaagggccatcggttttgaccctaatgcccccaata

SEQ ID NO: 50502 - DNA, 446 bp, Glycine max
  Clone ID: LIB3167-077-P1-K1-A5
gtccggttaatttgtgaaactaacaccaccacagggccttaataatggcagttgtttccccaaggggaggccaattaaagtccaccttaattgggacttttgtagttccaaagggcctttttgctttttaacaatttaacctggggccttttaaaaggcaattaagtttaactgttaaggccatccaatcagagaagccaccctataaagggattaagccaataaacggggacccattaattggaggcctggaaaccccagttccatccagccctttgatcgcatggaacttgtccaacctgcccgaatacaaaaccgaagtgggcccactactaaaagggatcgaggggggcctggcccacggataccttttgtggggcccattctggaaggccggcccttttaggaacaccaaaatcgccggccaagcggcttttttggccgcc

SEQ ID NO: 50503 - DNA, 419 bp, Glycine max
  Clone ID: LIB3167-077-P1-K1-A6
gtttggggtttcctttctcaataactctctttgttgttccgtttaaagggttcaccaggaggctcaaaacggcggttcggggaaggccgttcttgttgttccggggtcgttggtcgttgtgaagccgcagttcctcgtggaggttcccaaggccaccgccccctttttgtttttaagggttgctttgggcgctgaggaagttggccgtccgctcaaccttaagcgcaaggttgagcccgggctccttttattcctttccgaagaactaaaaatggttggttcaaccattttcgtggccgcacctggtggatgccactttttcgccggcgaaaccggggggaaccggggtcgttttgggcttgaggccggaggacgtggatggggcagtacctaaggcggtaggcgctgttccatttgcg

SEQ ID NO: 50504 - DNA, 264 bp, Glycine max
  Clone ID: LIB3167-077-P1-K1-A7
aaaaataaagaaggtggagggggagaatggttttgttttgaaggaagaaatccatttaccgtgcttaaaaacctttttttttttggcggccaatggtttaagcgtttacaattgcaaaggccaacttttgttcaaagttgacttttttggccccgccactcccgacaaaaacaaactccgtctcatggatcctaccggacgtggcctcctaaccgttcttcaaaagcggccaattttgcttaaacgttggaaaggtttcaaagg

SEQ ID NO: 50505 - DNA, 297 bp, Glycine max
  Clone ID: LIB3167-077-P1-K1-A8
ggggtggaccacacccgtccgccacacccgtccggaggaggaagttattttgatttttgagagtggaccccaccaaagaaggggatggattttaatcctttaaacggaaaaccaaaattgggggggatttcttttggttccacccaaggcaattaattcaatattagatgtttccatgaataattttggttgggttatcccatgtttggatgtcctttttttttaacgaatatatttttttaaaagatagtttttggaagggaaaattgtcaggcaaatagttggttgttttgttcc

SEQ ID NO: 50506 - DNA, 404 bp, Glycine max
  unsure at all n locations
  Clone ID: LIB3167-077-P1-K1-A9
acgggnntggaataccggggcggaccacacgcgtccgcttttgaaaaaaaaaaaagaaataatttttttttttaaaaaaaaaaaccaaaaaaaaagggggaaaaatataaaaaaagaaaagagaaaaaaggggcgcccgtttaagagaaccaaggtttacaaccgggggaatggaaggaaaaagtttttttaagggggaaccaaaatcaaatgaattggccgtgttttaaaaacgttggaatgggaaaaaccttggggtacaccaaaataaatggcgtggaggaaaatccccttttggcaagttggggaaataggaaaagggcccgaacgaatggcctttccaaaaagtggcgaactctgaaggggaaagggaaccccccttgaaggggccatttaagcggggg

SEQ ID NO: 50507 - DNA, 375 bp, Glycine max
  Clone ID: LIB3167-077-P1-K1-B1
cccacccgtccgcccacccgtccggggaattttcttgttggctggccagaaaacattaaacggtggcccaagccttgcgggggagaaaggcttttttcgcaggctgttttccatggggccaaaccacaccagggggtttaaactggccccaggggttggacccaacctttggaaaagagggaccatttgggtttttggctctaactaggaaggttgtcccatgattttttagaaatctggaccagtgttgggtttgcaatccatggtgtgaaccttaaaggcctgaaaggtcccttaactcttggcggacggagaattttgcttttggtttttgcatcggttttcgggttgtccggatattataaattcattttt

SEQ ID NO: 50508 - DNA, 380 bp, Glycine max
  Clone ID: LIB3167-077-P1-K1-B10
gccaattttgtggttactatggttccaacataaccaaaagccattttttttttccatgtggggggcccgaagttttgtttgggggtttaacggcctgggtgactttggtcccgccaccgaacccataaaaccctaattaactttttcccaattaaaagccaccaaatggtccttccttttggccctttccgcccttgtaatttgcaactatggttctgaaatgccttaatggttggccatcttggagattcccggggcagctgtttttccaatggacaggggtggttaacttaaagctgttcgaaaggtgcttgctcttatagccagggaattggttgctggctataaaccctaccaccatttttttttggggtttaagt

SEQ ID NO: 50509 - DNA, 216 bp, Glycine max
  Clone ID: LIB3167-077-P1-K1-B11
ttaacaaccaagggaccggttaccagatcctctattgcatgtgcagataaacggacggccaaggcctcccggttaatgcaaaggaatagtaccacccgtggccccctaaattggggcggcctaatatttaacggattttaaaggtggtttttctaatccaatggacttcaattattaatttaacacaatagtttggaggctggatatttttcaggg

SEQ ID NO: 50510 - DNA, 406 bp, Glycine max
  Clone ID: LIB3167-077-P1-K1-B12
ccaacgcgtccggtttagggttaatttttttaagggggtttgggttccaaagacaacccttttcccccggggggacccggtttaacggccgtgggggaaaggggggaacccaaatgccaaccgggtttaaaacagtccgggattttgagggttttggggcccgacatgtccggggatgaacgattggaattaacccagaattccaagggggtgctggttgttgaagggggattgtttgtcagggttttaaacaaaggagtttttcaattagcgtttggcataaagaggaaaaacaaagcgggggagaccaacatttattgggatggcatttacctctggttaacttacttaaccaagcttgattaaattacccttttgggggggccattgttaacggatgataatg

SEQ ID NO: 50511 - DNA, 294 bp, Glycine max
  Clone ID: LIB3167-077-P1-K1-B2
attgtcgtttttccccgcccattaaaatattttttaagcccagccttgggaccttccaagggaggaaccccgatttgttgtgggaggtccccaaagccaaacttgcacccccgggatcaggaggggctcaacctcccattccaattcctaacggtacccctaatccaaatccaaaccctaacccgaacacgcctaaaacccccaaaggatccaaaggaaaatctggtaagggatgcacttcctacccatcgtttaataaggccaagtccaaaaaccccacttgccttggttttt

SEQ ID NO: 50512 - DNA, 349 bp, Glycine max
  Clone ID: LIB3167-077-P1-K1-B3
cccacgcgtccgaattaaggttttttaaaaataatggcccctaaaacaattttcccaacactttttaagggggtcgaattttttcctttttttttcaacaatagggtttgggaccgcccttttggggtaggttaaagggccagggttaagctggtatgggttctgtttttggaattcctgggcatttccatgatcacacctaaggttttggcaccagattttgcttataactgggatggagggggttttggacctgggggtttaaagacctaacagggcccttttgaatgcacaggaggatgtagccggacacagtaccacaggccgggcatgtttttttgccaaaaat

SEQ ID NO: 50513 - DNA, 393 bp, Glycine max
  Clone ID: LIB3167-077-P1-K1-B4
ccacacccgtccgggggaatggtggtttcgttctttaacatttttccctaatttttttttttttttttggcctttaatccaaaaccttattctttttaacaatcgggggggcttcctcaaccagggcccatccttggccggggattcttttgggggggttggttttttttcggtttccaggggctaccaatccgtttttaaatttggatcagccatgttaatgggttttgatgaaaatgatggggccgatgttttaaggggggggtttttttgcccatttggttctgggatttttgatatcgtgggatattgctgccccattgccgaaaggcttccattgggggcaagaaatggggtttgccctgtttgtgctttgagggggggggttgtttt

SEQ ID NO: 50514 - DNA, 422 bp, Glycine max
  Clone ID: LIB3167-077-P1-K1-B6
tttggggggccgggaaatccacccaggggatgttcttggttccggtcctttacgacgggttggccaaccacaacctggttgggccttttttttttggcggggggggcccccagttggaccaggccatttccaggaatggccggagcctttacctttttgggcagactgatggtggggggccgaatcctttggggatggcgaatggcggggtggggaagcctagggtggttgttgttgagcccatttggcagtttatggaaagggcgcggtccccattggggaggaggaccaggaccttcttccttcctgggggggtaaacagaattggggaatggccacaaatttccaggatgggggttccccatccagccagccttgaggtccttgttggggaggttgaaggacaacttaatcgccatgct

SEQ ID NO: 50515 - DNA, 359 bp, Glycine max
  Clone ID: LIB3167-077-P1-K1-B7
ccacacgcgtccgtttggatccaacaatgcttttggccccaggcattaaataggatttaaccatttaatggaaccattttaacaggatgcggaattaaagaaaattttggtggaatattgggataacgaggtaatatactaatagttggggggtttaaataaaactaatattaataattaactcaatataggcaactttacgttggggggtttaataatccagttaagatttaagctatcttggataatgttaagggaggatcatattctttggggtggaatttggggtatccaccagataacaggtggtttccggggaatattttgtgttaggggctttaatttattaattgaattat

SEQ ID NO: 50516 - DNA, 291 bp, Glycine max
  Clone ID: LIB3167-077-P1-K1-B8
cccaagagggcttttttcctctgactttttttttttctggctatcctttgggttaggggaactgttgaaggggcaactccaggaagcccattgccaagccaccatgtttaaccattaaacagaggcctttttccttccattttccttttgggaatgggtttttttgtttaccaggcagaaggggcagcaggggaatatggggtgggcccaagcatatggaccacctacatttgacggatttctgaaaggatttgggatttttgcactcgtgccattggagcgttttttttt

SEQ ID NO: 50517 - DNA, 340 bp, Glycine max
  Clone ID: LIB3167-077-P1-K1-B9
ggtaagtttatgaacagtcaccctgccttgtttaaaatttccatttccggaacctgaaatcaaactctcttattcctttttttaataaataaattaagttttttcccattcaaatgggatggggattttttttaagcagtccaaaacctgaaaggttttttgaagatggggaaaatgactgtcttagatttggttaatcgtccatgcaggggtggcgtgcaccaatggaagaggctaatgctgcatatactgatctggatgagcccacttcattttttggggtttatgatggtaatggaggtaagggggttgcaaagttttgtgccaggttttttattta

SEQ ID NO: 50518 - DNA, 338 bp, Glycine max
  Clone ID: LIB3167-077-P1-K1-C1
cccacgcgtccggggaagggatacccaattttgttgaactaaggtgccatacaaggtgggggtggccattaccatggccatggccaggctagggcggtgcttttaattttggtgttgccactgccactactttgtcaggagcagtaataaggagggggaattggggatttaagggtccccggccgattgggattgggccttggacttggagtttccttctggtttatggccaggcccaaatccttaattgcctcggttaaaataaaggggggaccttctttggatgagatactaaaaattttctaatggcccaagcagttccctttaaaggaggagga

SEQ ID NO: 50519 - DNA, 289 bp, Glycine max
  Clone ID: LIB3167-077-P1-K1-C10
ccaacccttccgggaactttgccaccattgtccattgagttaagtaggccacatcctcatgtggaagaatttggtcctgtgggcaaattctactttcttgccaccaaaggagtggaagctattttttgtttattgtcaaaggtttttgttgttttttatgtttaattttacattttaatctgtatctttttttaatttttattttgttttgtttttctacattttttattatttactcttatattttatctttttttataattttattatttttttttatattattttt

SEQ ID NO: 50520 - DNA, 439 bp, Glycine max
  unsure at all n locations
  Clone ID: LIB3167-077-P1-K1-C11
aaanccggggccgaccacacccttccaaccctttttacacaaattaatttaaattaataattccagttttaaatgcccttacacctttgtcaataataataaaaccttggccctaaaatattaatccaactcaaaattaacccttttcccaataaattattaattttattccatttttacatctttcttgaattaatacttttattaatatttatttaattaaatgttctttttaatttttatttttttttttatctaatttaaatttttcttatctattatatattatttttatctatttttaatttttttttttatttttattatatattatttatctttttatatttatatttattttatatttttatataatttattttcttaattaaatcttattataataactttttattatacttatatatatttattatat

SEQ ID NO: 50521 - DNA, 298 bp, Glycine max
  Clone ID: LIB3167-077-P1-K1-C12
cacacccttccgttttggttggtaaaagatggaagggctttgtatattctaatccttgtttctgccggattgggggtgttttaaacttaaaggggcttttttaaatattccttttatttttaattttttatttaaattataaaattttaactttttttaatttttcaaatttttttttatttttaaatttttagtaatttttattatttttttaatatcatttgttttttttttatattataatttatttttatttttttttatttttttataaatttttttaattattttgttttaa

SEQ ID NO: 50522 - DNA, 407 bp, Glycine max
  Clone ID: LIB3167-077-P1-K1-C4
cggggcggaccgaggcgtccgaatccctttcaagggcggccccttaatttttttttgttttaaactttttttcctccccctgggggtttttttctttggcaacgtggtcccgccgtttttttttcttgcttcaaccttaacaccaaccttccaaaccctttttcttaacccttaaatccaaaccctctgccgccatggccacatggtttttggccaggaggggtcaggtggtggtcggggttggcagggccagggaggtaattgccggggttaataggtccgccgttaatgccggggggaccatcattagggggcccatgactaaggcctctattttcccccatggggcggttggggtttttggggcggcaatggggatgtttatactggttttttccggtgtcggg

SEQ ID NO: 50523 - DNA, 442 bp, Glycine max
  Clone ID: LIB3167-077-P1-K1-C5
gggggaccaggcgtccgccaattaatgcttttgtttccttttgatctttttaaaaaaaacccaagaagtttttgttttgaggttttaacagaatttgtggttcaaccacttgttgaaattcttgttggaagtgtcctgaaatctgaattgccagggggccttttttgtgccctgtaatgtgcattactgaatccagttgatccaattaaaactcgggtccaagcttaaacaatgtccttccttgaaataatttttaagctgccaaaaattgaaaggcggggttaatccaggggctttatccttgcaatttttgacacagttttaaagccatggtttgcaaactgggatatttgaagcaggaaaatgggggtggttaaaaatggttcctacactgccagaactccaggtccaatttgtggcttaattcttaagcacatttttg

SEQ ID NO: 50524 - DNA, 285 bp, Glycine max
  Clone ID: LIB3167-077-P1-K1-C7
ggccaggtggggcttatatgaccctattttttccggggatcaaatcatgagggttgggggattgaaaaagttggatggggcccaccttcttaattttaatccattgattccaacttctaccaaccaagtttttttggtctgggatgcctatggggcaatcaaggtttcccatgcctccctttttcttggctttgggtattagttttaatatcctggtttcctataggtgttctttattttttctatttttcccttattatttttcttggacaatatttttttttt

SEQ ID NO: 50525 - DNA, 280 bp, Glycine max
  Clone ID: LIB3167-077-P1-K1-C8
ccaacgcgtccgggggtggggaactaaattttccagggagttggaaacaactttttaaggaagccgttttttttgggggggtgggaacaatgcaatgggatatataaacctgaagttttgaacatatttaatttttgttttccggttgtgaaaaaacttgtttaaatgacaagctttgggggaatcaattaaaaatggggttaattgtgaatggttacattgttaaccgccatttaaaaattgggggaaacaaaaagtgattatttttatcattattttt

SEQ ID NO: 50526 - DNA, 266 bp, Glycine max
  Clone ID: LIB3167-077-P1-K1-C9
aaaccaccacctttaaaaaggcaaacttttttaaccttggctgcccccaccgttgtgcggtggctctaaacaaggggggggtcccattttgccattttccttacaaattggaaggcccaacccttttaacctgtttactttctgtccaggtttgcaattggggagcctgacacttaaactggggactacaactttgggttttaagtgtttccagggaaggcttgcaaacctgtggatgggtatgcctctatgtattaatttttcct

SEQ ID NO: 50527 - DNA, 410 bp, Glycine max
  Clone ID: LIB3167-077-P1-K1-D10
cccacccgtccgaaaaaaaaaaaaaaatatttttaaaaaaataaataaaaaaaaaaaaaggggaaaaaaaaaaaaaaaaaagggggaaaaaaataaaaaaaaaaaaaaaaaaaaaaggggggggccgttttaggggtccaaagtttatttcccggggtttgcaacttttttttttttttttgggttccccaaaattaaattaattggccgtgttttaaaacacttttatcgggaaaacccttgggttacccaaatttattgctttggaataaaatcctctttcgcccggttggtttattacctaaagggccccccccattgcccttttccaaaaattggccaatctttatggcgtattggacctcccctttatccgttccattattcccggtggtttgtgtgtttccccc

SEQ ID NO: 50528 - DNA, 276 bp, Glycine max
  Clone ID: LIB3167-077-P1-K1-D11
ggaaggaggccggcaaaggcctaataatattctccataaatctggggctccgggagccggaccatttggattctgctatgcggctggaggttcctaatttggcagccaaggttcatgatgcaaaccgcaacctcaaatttaagactttccgccgttggctgggggggggggccagccaaccattaactgttccaccagaaatggtaggagaccttgttttggttgccacagggttttttaccaggggtgactcccaaaaggttttggacatttttg

SEQ ID NO: 50529 - DNA, 344 bp, Glycine max
  Clone ID: LIB3167-077-P1-K1-D12
agcagggcccccaagggcaccaggatttgtttcgggtccagttccaaattttggaacaccgatggcgcaacaacaaccgccggcggaggcgaccagagtttcaatttccgccagtcgggggacccgccgccgaagttgatcggccacttctttaaaaggcaggaagcctccggcaggatgcagttggccatggatttggagatggaggacctgaaccccgaaggcaacaccggaaagtaaacgccgggggttgaatttccgttgactaactgggtttgaggggagctaaaggtttccttgggggaacctacctgcattgggaatttcctggaagcgcaaaacaa

SEQ ID NO: 50530 - DNA, 271 bp, Glycine max
  Clone ID: LIB3167-077-P1-K1-D2
ccacacccgtccggttggtaaaagggggctggcgtttttttaccttggcaggactgatcaaaaaggaataccttgccgcttagtggttggattagttcctattaaaattggggtggaaaaagttagtaagatccatattggggggatgcaccatcaaatttttttacattaaccactattttcgaaggcccaacacatttttaaaatcggggaataatcaccttaagaagttcgggccaagggcaaagatccggagggacaatgcgaccat

SEQ ID NO: 50531 - DNA, 405 bp, Glycine max
  Clone ID: LIB3167-077-P1-K1-D3
aagctatggccattgattggttggctccaccattttttcttggcagataataattaatttaagtcctggggctggtaacctgtggatccatgatcatggactaaggggtggcggaggaacgtcccctgccaaaataagcctaatggcctcccaaggtggatataccaacggtggttccttttcaactgggggcaccactgccaaattggccggttactttccttccagggccggaactacctgcagtacctaaggtcccaattcctgaggtaatagtaattaccgccaaaataatccctggggtcccaaggacctatccagccactactactaatttggcaactggctaaataaactggtggtggccatcccaggggggttctggtttggtgggggtttaatttt

SEQ ID NO: 50532 - DNA, 256 bp, Glycine max
  Clone ID: LIB3167-077-P1-K1-D4
aacacctatttgattaattttagaaactggtatgtatgggaacctcaaggatttttcctaactgtgcttcctttgaaggcagggcgggttcctccgccactccaattttcggttgtggttactgtgtcataccgatacaaaagttcaggcctggtaaaactctaaaaaaaccttttttttgggtaaccaaaataaaaattaatagcccgctttttaaaaactcaagattgggaaaaccccggtgtttcccaattta

SEQ ID NO: 50533 - DNA, 431 bp, Glycine max
  Clone ID: LIB3167-077-P1-K1-D5
ccacacccgtccggataactggaaccagggtgtttataaaggaaggccctggtttttttcgtggttccaattttggaggcatggcattgccatccttccaatttgttccttttccgaatgaacactggttatggggcccgtcctccggaggtgaaatgcccaggttggaggctggctgtggaagcacacaccatttttggttttgagcccatccttgaggagtgcgttgaagcaccaaaggatttcatctttggcgaccattatagatcagcctccaaaccagttaaccaacaggcttatttttttgccggagacctcgaattccatccaaaggccccatttggtttaagatattttggccaccttccttttaatttttccaacctccaaaaacattgtttatgggggggtgaatttttccccgccctggt

SEQ ID NO: 50534 - DNA, 442 bp, Glycine max
  Clone ID: LIB3167-077-P1-K1-D6
cccacccgtccggaaaatcctaaattttttgggttgccaaccactttttttttgtttttggaaaattttaagttggcaaagaaaatttgaatcatgtcggggcaggcgtttgtcgccaaccaccttttgggggccatcgaaggtacccacctaactaacgctgttttaatgggccaagacggcggcgttggggctcaaagtcccgccttccttcagttaaaacctgaggggatacctgccatcatgaatgactttaatgggccgggatcactggttccacctggatggtttctcgggggccccaaatttttggtcttccagggggaacccggggctgccattcgggggaggaagggtcctggtggggttcctgtgaagaagaccggggcggccttgatcatgggcattaatgatgaaccaatgactccaggtcattgcacca

SEQ ID NO: 50535 - DNA, 399 bp, Glycine max
  Clone ID: LIB3167-077-P1-K1-D7
aaggaaggaaggggaggggaggattcgtttcctaagatgggggccccttaaccttaaaggttaattccacaccaaatggggggggtccaaaccgccccccttggattcggtttccatggagtcaagagcgccatcgtgggttttaacccttttaaattttaattccattttacagggggattggatgaagcgttgaaaaggcattgcaaagttaacctgtccggacctgtttttcccatgagggaggagcttgccaggcaaatcttgtccaggttccagcggcctcctggaccaattcctttttaaatgctgggtttggggactgttccaggaagtgttgatcacttgggttttggggattgtttaaatgcccccctgggtgaagagactttccggcct

SEQ ID NO: 50536 - DNA, 337 bp, Glycine max
  Clone ID: LIB3167-077-P1-K1-D8
aggcgggatgcctttttggcaaatgaagcttttaaaatgtggccttaaaccaatggggtcattttggaaatggtttccactggatcttaactggccctcttaagggcaaaccaggcttttaaggcccgtttaaaaaggtccttggaggaaaacgttgcctataatactaaaggggccatccgcaggctatgggttcctttggggggcccattccgttttgggggggttggggtgaccatgccattggcaaaatttggggctaaacggtttaaccagaggattgcaaagaaggcctccaccgccagggccctgatcaggattttgtcaccagggggta

SEQ ID NO: 50537 - DNA, 217 bp, Glycine max
  Clone ID: LIB3167-077-P1-K1-D9
acacccttccgcccacgcttccgtttgaatccaggaaattatatataaatgaagactaaaaacaattgggagagattttgaaaatggtttgggggggattttaaattaacgctcctaaaggtaaaccaggctttttatgcccgttacaaaatgtcatttaaagaggccgttgcttttaatcttaaggggggcatccgccggttttgggcccctttgg

SEQ ID NO: 50538 - DNA, 142 bp, Glycine max
  Clone ID: LIB3167-077-P1-K1-E10
ggaggaccaacccaaccgaaggaaggaaacaaaaagaaaacgaaaaagaagaagaaagcaaaacacaacaaaggggggaaaaaaaaaaaaaaggggggaaaaaaaacaacgacaaaaaaaaaaaacaaaagaaacaaagaaa

SEQ ID NO: 50539 - DNA, 417 bp, Glycine max
  Clone ID: LIB3167-077-P1-K1-E11
acccttccgaaaaaaaaaaacgggattggttctttttttttattaacccacaaacccaccaaccgggaaggggggtgggggaagatggggtggcctttaacaaacctgttcagatggttgttggcgatgaaggaaatgtggattttgttgttaggtttggttcctgttggtaggacacccatctggtccaggcttatgcttgttgaatttgttgcaaccttcccaaccttcggttttaatgttgtgccggtgaaatccaagaccattaactttaactttggggaattgggttgttaaggccaggctcggtcccttgtttaggcatttttttccagacctatttggtttttattttaagtgtgttttaatcttttttttgggtttatacttttttagctctttatttttatgtttttt

SEQ ID NO: 50540 - DNA, 440 bp, Glycine max
  Clone ID: LIB3167-077-P1-K1-E12
ggaggatgggagtttggatgctgaagtcttgaattttatggcggtttaaaaggagcatttccatactgttttgggaccaggcaatcaatttgttttacaggaaatggtggttggggtgcctaaggtaagttggggggttttggggggccttgagattgtaaggcgtgggctgcaggagactgttaaatatcctggggggcacctagaaaaatttgggaggttgggtttgtaaccattaaagggggtttttttttttggtcctccaggagggggaaaaactttgttggccaaagcaatggttaatgaatgtcaagctaacttaataagggtagggggcccagaatggttaactatggggttgggggaaggtgaagccattgttcgggaatattttgccagggccaaacattcagttcaacggtgccttttttttgatgggc

SEQ ID NO: 50541 - DNA, 279 bp, Glycine max
  Clone ID: LIB3167-077-P1-K1-E2
aatggatcctttgggggggataggaaaaggtggttggggcagttttaaaccccatttttgaacggccatggccatggttccggccttttttggaaacccagttggggggggactaaaaccaactgggccccgccgggttggttgcctaaaataaaggcgatgaaaacaatgcagggaaaaggggggtgttcaacgaacgacaagacggtggctggggaggtggtccggttgtcccttaacccaaggtccaataggccctttgggaaaaaaataaagttc

SEQ ID NO: 50542 - DNA, 249 bp, Glycine max
  Clone ID: LIB3167-077-P1-K1-E3
caaaaatttgggcggcagaattttaaggccttttttggtaagcaggcacaacacatcccggaaagggcttttgcttttgtgcccagggctttttggttgagctttgtaataaacaacaacaggcgttaatccgaggcctttttaaggccactacccctacgtgaaccaaaggggaccttttgtacaacaaaggcggtgccaaattccagggttcaaatcaattgcatttttgatggaaaagtgcttttc

SEQ ID NO: 50543 - DNA, 425 bp, Glycine max
  Clone ID: LIB3167-077-P1-K1-E5
actaacctttttttttaatcacaaatacgatggtttccatggcacccacaacctttttttaaaaccccaaactttaatttttaaacggaaggcccgtcacatatttttcccgggtggggcccaccaccaaattatcctaatccaaccagggcacaatttccatgtccttaacccaacccccttacgacctccagtccttaaaattccagcccatcaaagaatccatcgggtaacgggaaatgacgcgccgttccatgaccgccatgttaacctacgccgccaccgactttgtattcttcggagccggttcggccgggttttcttgcgcgtccgagctatagcaggaaccccgccgggggcggggccatagttgagcagtcagtgagccccggcggcggcccgtggtttgtcggccagtttttttc

SEQ ID NO: 50544 - DNA, 415 bp, Glycine max
  Clone ID: LIB3167-077-P1-K1-E7
ggattggttattgacagggttgttaaattttttgggcgaaggttccgggggaccattttggtttttgtaggtgattgggggtgttttttttattattttctttattctatttttttttactgttcttttattttatttatttttttagaatttattatttttttttatttttattttttattttttaattttttctattttttttattttattttcttttttttatttttatttttttatttttttatttttttcttttttttattttttaattttttttttttttattattttttttttaatatttttttatttttttttttctttttttatatgtttttctatttttttaaattttttattattttttttttattttttttcattttttttttttattttttgtttttttttt

SEQ ID NO: 50545 - DNA, 78 bp, Glycine max
  Clone ID: LIB3167-077-P1-K1-E8
cccacccgtccgcccaaacaatgtgaaggacttgcctattattcttggccacaagccattccaaacctttagccattt

SEQ ID NO: 50546 - DNA, 448 bp, Glycine max
  Clone ID: LIB3167-077-P1-K1-E9
aaaacagttaaccaacaggttaacttttttgtcagagacctggaagtccatcccagggccacatttttgttcagtttagagggcaccgacctttttaatattccatactacaaaaaacatggttttgggggggggaaatttaactcgccctttgttgatgaatgggttaccaggggctatttacttgcttttctttgttcttttaatattaacattttgttgtttttttttggtttcaaagtttttatctttgtttgattttaaattgtgttatctatctcttatctttttttttccttttttgtgggtctgttttctataatttttagtttaattaatttttaatgttttatctttttttattttctttctctatattttttaattttttctattatatattttttatatttattcatttaatatctctgctttaatttttattttt

SEQ ID NO: 50547 - DNA, 295 bp, Glycine max
  Clone ID: LIB3167-077-P1-K1-F1
accagaaacaaaggggcaggaattagggggcttaaccgatggccatggggctgccaccagcgtgaggaccaacaatttcgttggttttgttgtgggggaccaaaccaaaggggggatttcagttctggggttggggggggtgattagggcaaagcagcagggggttgctggggggaattactccataccatgggaggcaaaagatggtttgattaaaaatgagtttgaaccgaaggtttgggtgagggaatggttgacctccaaggggtggctggaattcaagccagccaatgtt

SEQ ID NO: 50548 - DNA, 337 bp, Glycine max
  Clone ID: LIB3167-077-P1-K1-F10
ccacattggaatccatacctggccgttaatattaaaggaacgtttataggcggcttcccacctaccttaggccttcccccagggctcgtgttgaaccaccctgtgggggcctcgaccattcccaacctggggtggccggcattggctaaggcaggaaatgcggggggctccatggaggaaaggcctcaaggcaattcaattatagggatgggggcatccttgttggcagttgtatttgccttaacctttttaggcccagccttggttttggtggatgggagcctatcccctgaaggacccggccttcctttgggccttagcaccaacccctttgttt

SEQ ID NO: 50549 - DNA, 428 bp, Glycine max
  Clone ID: LIB3167-077-P1-K1-F11
ggggttaccaggggcatggcaccggccctgcccgggacttttaagaattccaccaggctggggtttttgggtttaaagattttattttggtcaggaggaccactggccaaccaggccgtaccagaggcaaccttaaggagggttggttcccacccatgggaaaaattaattttaagggatccacaggatccttccactccaaaggcagtttcttccaaaccagcaccgggggagaacctgttagggcggggttccaccatggtggggatcatgggggcccaagggggcgacctcctcgggggccccagaggcgaaggcaggacctttaagcttcctaatcccctgtcctccattcagtggttccttaacctttaaccaatttagctggctcctatctatctttatgtaataggatgcgttcaaatagg

SEQ ID NO: 50550 - DNA, 406 bp, Glycine max
  Clone ID: LIB3167-077-P1-K1-F12
gtttttggggttctgcacctgaaggggagggaaaggaagcggaacccaaataaggggttctttacttgggggttccatggcatggggggtagctttcctactcctggggctgggggtggggcacccttaaccttaacaccataggatcactcgctggccgggtaaaccccatgttaagtttaataagttttaaggttttgtaaccgtggatgccaaaaaccagcgggcactttttttttacttggttgaagccgaaaaggatgcactttccaggccctttgttttggggttaaatggagggcctggtggttcttttttgggagtgggggcattttaagggaagggcccatttaggcccaaggtgaagggctgggttggaaaccaattcagttggaccagaaaggcg

SEQ ID NO: 50551 - DNA, 396 bp, Glycine max
  Clone ID: LIB3167-077-P1-K1-F2
cccacgcgtccgccacacgcgtccgtggaaatggatgatcataacaataagccccaccatcataattttggcttgaccgatttagggcagggggggaataacgggccggggccggccaatacaactttcccttcaatgcggccgaacccaacgggggagtttttcccgggccaccacaaccgtaatttaactcttttacctactaataatcccaaacaccaccagaattttagggttttgatgttgggtcaagacataatgccacctggctttaacaactttgtttccacacccaatgattttgttgtggttaccacaaccataaccttacccattcaaccggttacttgcggttttaatgccgttgagggggcaggttgcatcggtggagacccc

SEQ ID NO: 50552 - DNA, 404 bp, Glycine max
  Clone ID: LIB3167-077-P1-K1-F3
aggacattacctccattgttggcaacgggggaggagtgcaaggcatgcagggggggccaccagtgggcaggaaaaagttggggactttttcttacctgccagaccttgaggaggcacaatgggcaaaggaggtggaatacctttttaggaggggagggattcctggttgggaattcaagtgggggaacggtttctggtcccgggggcccaccaggtaaccaggttactacgagggccgctcctggaccatgtggaagctgcctatgttgggtggcactgaggcttttaaggggtggaaggagcttaaggaggctaaaactgattaccccaacggtttaatccgaataatcggattcgacaacgttggccaggggcagggcataagtttaatggcttccaagccc

SEQ ID NO: 50553 - DNA, 442 bp, Glycine max
  Clone ID: LIB3167-077-P1-K1-F4
ccacacgcgtccggttttttcttaactgaaattttgccaaaatgggcaccggattggggtcctttcaacatggggggatccacacgcttggcaaaaaatccggccccttattgcccgtttggttcgggtggggctccgtgggggggggctcgtccgtggaaatcgccagggccgtcctaaaaacccacgggtccaccttggtcggtgggccgaagttcggggggggcaatatcacacctttcaatgactgggacataacttggtcccggacgggcccatactgcttccgggcctgttgatggggcttaagggatttattcatcgttaaacccctccatgattccgaatccattggaaaccaggagcttggtggctctttaaacgaactttttatttccgcaaacaaaccagtttttttatatgaccacttttccagcttttg

SEQ ID NO: 50554 - DNA, 341 bp, Glycine max
  Clone ID: LIB3167-077-P1-K1-F5
aggcgcttaattttctggccttcgggggcttttttatggccgtcctacctggcctaatttttcttcatcctaataattccgcccccttccttccccaatatccatttcctgggcttggaaggatgcctggggttcctaaggaggcccccgtttttttggatcagctcaggcagatcctggttgagttggcaaaggagggggatggggggcagtttcatagcccagggaccctccttttggctttggggggggaggtgggggaattgtctgagattttccagtggaaaggtgtggtttttttgggctttttctttttttatgtctttgttcggttttttttt

SEQ ID NO: 50555 - DNA, 376 bp, Glycine max
  Clone ID: LIB3167-077-P1-K1-F6
ggaggggattccaccaatgcgaagcggggtttttaacccacccgggaaaatccaatgcaggctaatttccaaaacctccatttttaacgacgttgggcttttccgtttggccttcccctccgacgccctattaaggggttggccggtggggaggcacatattcttatgggccaccgttgccgggaaactatgcttgcgggcttccactccaccaggcagggtttacgaagtgggttccttggccctggtcgttaaggtttacttaaagggggggccccctaagttccccaccggggggatcatgtttaaccacttggactttttccccattggtttctgccttggacgtgaaaggcccacttggccccattgaatc

SEQ ID NO: 50556 - DNA, 410 bp, Glycine max
  Clone ID: LIB3167-077-P1-K1-F7
gaaaaaaagaaaactcccttaaaaccctcctttttaaggtcctttcctttcttcttttgggtctaagaaaaaacaacaattcggaacaaaaccaccaccttggcggcaggggcaaaaactcccttaaacactttctcttttttaacattaacactctttttttaattctttttcctcaaactttttttttcttccccaaccaccatcaacgaccttttccgttccaagggcttaccaccggggttcttcccggggggggggaaatcttccaccttttttgaaactgggcacttggaagggttcctggacgcaccatgcttaacaaattacgagaccagagtcctttttgaccaagtcgtaactgttaacctaacttacggaggcctcataggggtggggggtttccagta

SEQ ID NO: 50557 - DNA, 192 bp, Glycine max
  Clone ID: LIB3167-077-P1-K1-F8
aaaaaaaaaaaaaaaaaaaaaaaaaaaaatttttaaaaaaaaaaaaaaaaaaaaaccccccccttccggtttaaaatgggggggggccgttttaggggaccaaggttaacttccccgtcattgcaacgtaaaagttttttattggggcaactaaaatcaatttaatggcccggggtttaaaaccgtttggcc

SEQ ID NO: 50558 - DNA, 422 bp, Glycine max
  Clone ID: LIB3167-077-P1-K1-F9
gaaaatggttctgtgaagggcaaaaatttttttttaaggaacctaaagattttcccctggggccgggttataatcgggggggggccttttattttgtccaattcttattttcccttctttccaccttatttttttttttttggtgccttttaaataatattaattttctgtttttttccaccttttttttttgggaaaaacctttttttcccctatttataattcttaaattttatccttttttttctttttcttatttttaatattttcccaactttttattttttttaaaatttttctattttattttttaatgtttctctcttattttacctaatttattttcgttgtttttgttttttttactttattttctttttttttaatttttcctttattttttctattttttttattttttt

SEQ ID NO: 50559 - DNA, 278 bp, Glycine max
  Clone ID: LIB3167-077-P1-K1-G1
aaatcccggccgaccacacccgtccgaccgttaaggaagccttggacctggccctttttttatcggctctttttcttgcctgtccggcggtaatatagggctccaccggggtcgtactattatggcaggaaaatttctccctaggaaactaaactgaatgaccttttttttttttaaaaaaagtgccccgttgtttttagcagaatgctcctgattttaagcttgttttggttgtaccgagatctttatgtttttataaatttatgggcaagtaattc

SEQ ID NO: 50560 - DNA, 440 bp, Glycine max
  Clone ID: LIB3167-077-P1-K1-G10
gcctgttcaaggaaggctgggggcccaggtggcctcaacaggaaaccaggctttttgagaaggctttggttgggttggccagggccactccggcccgggggttgaggggggcggccttgattcccggcaggacggtcggcgatgtgatcaaccagtttagggaactggaaaaagatgtgggggtaattgaataagggttaattcaatttccagggaccactgttgttgattccttaacatgggagggggtaaccaataaaggattggatggcctaaggcagtttaatggggtaactggcaaagggggtgcttcaactaaaccatttgaccaggaaaggaagaaaggtgtgccatggcctaaaggggagcccaggcaatttttgatgggtctgaagaagtttggtaaaggagactggagaaccatttttggcaattttggg

SEQ ID NO: 50561 - DNA, 387 bp, Glycine max
  Clone ID: LIB3167-077-P1-K1-G11
gaggtggggggcttcgttttaggaagggcaggtttggtcggattaagattcaaaccgctgttttttggcagtttttcggatcctcttttccttttccttaagaaaaattaacccctttcaaggaaggaaggaaggggcgtccttttccaataccatgggcggatcacctaaccgttgaccagatttgggagttcagggaggccttcagtttgttcgttagggttggcgatggttgcataacaccaaaggggctgggacctgttttgcgttcgtggggtcagaatccaccagaggctgggctccaggccttgatcaatgaagtaattgctgttgggaatggccccatggccttccctgggtttttgaacctcatggttggaaggatga

SEQ ID NO: 50562 - DNA, 418 bp, Glycine max
  Clone ID: LIB3167-077-P1-K1-G12
cggttattagggaatggtttaaaagtttaatttaacaatttaaggatgaattaaaaattccccggggatctgtaattaatttttaaggagccaggggccatgttttccgtccataaatggatggccgggaggggggaggcttccagggtaaactcctatgtaggtaaattttggattaattttttgggggggacccatttgccaaacaggccaaagaggaaatggggctcaccatggttttttccctgtggggttttatggttaaactaagaattttttttaagccatgaattttgtcccctggcaaattccgggcttggggtaattttggttggctgaatcatttttattaatttaaccatgtggagtgttacctggggcttaaggattgcaatttgaaattggccatattcttatt

SEQ ID NO: 50563 - DNA, 381 bp, Glycine max
  Clone ID: LIB3167-077-P1-K1-G2
tggaaactgaaggggtttgaaactgccctactttgcccgtggttatttataaagcactaactcggcttaagttttttttaccaccaaaggggggttgtgaatgggggcaggaccttgttgggctttagcattagaaaagctgggaggggaatttaagaatcaaaggggggggttttaagggtggggttattaacagacctccgggccattggttttgttagggggcaccaccaaaggttttttccaccaaccaaatgttgagggggccaaagcccagggggttccagggttttagatttaacatccccagggaaccaagaaggttgaaggcggccgtccacagaaggcatttagtactgggtggcccaaagcaataccacc

SEQ ID NO: 50564 - DNA, 437 bp, Glycine max
  Clone ID: LIB3167-077-P1-K1-G3
ccggtttccaccgacatttttggaatctttttaacaatccggggatccaatttggttccgttaatttaaatttaaagggccgataataggcaccccaataacgagggggcaggtctttttttcaaccagtccaaaccaaaatccgaacaaccaacgccacctgagattcccgggttttttttcggatggaccgttgatgggttcccgttgggccacggaagcgtcgtgggccagccaatgggccgggcccctgggaactcctcaatttgcgcttgtttgggccaaaccgatcatttttgcagaagcgatttcgaagttggtttttttgggaggggggctccttgggtgctgtttggaagcaatgttgaaggactggatattgttctggggacatttgccaatcactgtttgccatattttggaaggatttaattgga

SEQ ID NO: 50565 - DNA, 398 bp, Glycine max
  Clone ID: LIB3167-077-P1-K1-G4
agggggatggagggttggggggggggggtgaaggaatttaggaaaaatgggcggccggccttgtttactaaccacattttttgggcccaaatggttccatttaaaccccataaaagccccagttgggttttttccaccaaaggcgggtggttttttgggggaccagcaccgggggcaccagcggcagcagaggaggttttgtgttaccatgggcggcaggggactaacagccgggggggatgggtctggttgcaaactcagggggggggaggggcaccttcatgggggggctgccaggggggtttgggggagcagcaaagcccccgagggggggcacccttgcctcaaccacactcttaagggccaccccccctgtcttatgctgggaggattcccac

SEQ ID NO: 50566 - DNA, 330 bp, Glycine max
  Clone ID: LIB3167-077-P1-K1-G5
acacagtttttgaagccctggttggttcaggattgaaaatgggccgattaggggatgttcctcccattccttcggttggcccacgtggaaggggtgttggaaggggtggaagcctttaaacttcctattttggggtggctttatttaacttttaatgccaaagggaatggtggccttttgatgttttttaggtaaaaatcagaccttttattgcttttttgggggggttgaccagaattttggtggggtccccatttaatatttgtggccggggattttttaaagttgagctttgtttttcctaggttgggaggtttattgtttttttta

SEQ ID NO: 50567 - DNA, 420 bp, Glycine max
  Clone ID: LIB3167-077-P1-K1-G6
gaccaccatgaattttttaaccttcgttccttttttacttttaatactaccagcaacctaattttcccagatttgggggaacaaccttttaactaatggaaggatattcctaaaaaaggccaccatttttacctggaccgctgtcatttttgacgggggtggcacaggaccccgtgtgcatgttttccatttggcccagaattgggatctccttcccatgggggttggtctggggcttaataaaaggatcacacccggttttaagggcttacggggttgatcccgggcaagctgcaaaatctttgtttccactttggggggaagcagaaggggtagttcctgaggacttgcttccaaacacacccgtttggttgggggcaactgctggtttaaggtttttgaaggggaatgcttttgaac

SEQ ID NO: 50568 - DNA, 369 bp, Glycine max
  Clone ID: LIB3167-077-P1-K1-G7
acacccttccggtaaccataagttttaatgggctgggggggcaccaagtaatgtagccatggttccatttatgggtgaccaaaaccacgttgccccgttggggttattgccttgtgggttttgggggggacccaaagggaagggcttggtttttctttattgggccccccaaattaaaatccttagccccagttaagttggggggttttggcttaactggggttggaattcgatccttgggggtgtgttaaggggggtgccattaataacatggccattgtttgcggggcaaaaattgaatgcgattttgttttgtgggggtttaaatgggggggtggggccaagggttggtgaaaatggtttggggga

SEQ ID NO: 50569 - DNA, 409 bp, Glycine max
  Clone ID: LIB3167-077-P1-K1-G8
ccacacccgtccgccaacgcgtccggatcgggttacctggaaccagggggatgaaaatgaaggtcctggtttttttcgtggttccaattttggaggcatggcaatgccatgcgtccgatttgttccttttccgaatgaacactggttttggggcccgtcctccggaggggaaatgcccaagttggaggcttgttgtggaagcccacacaattttgggttttgagaccattcctgaagagggcgttgaagcaccaaaggattccatccatggcgaccattttagatcagactccaaaccagttaaccaacaggtttactttattgccagagacctggaagtccatccaagggccacatttgtgttcagattagatggcaccgtactttttattttcccttactccaaaaa

SEQ ID NO: 50570 - DNA, 416 bp, Glycine max
  Clone ID: LIB3167-077-P1-K1-G9
ccaacccttccgttctttttttccaattttaagatttgtaaccggttttcaaaaaaaaaaaaaaaaaaaaccaaacctttaggggggtgggtttttttgttaaaaatttttgtttgggtttgaaattttttggttttgggccggcccagggttttttgagatagaatttgcccgggaaagcacccccaatcttggcattagaattgggggttcccaaaaatttggggtggtaccggtttttaataactttggtggttcaaatggggctttacactgatcgtttgggccctttaaagtccccttttgttgggcaggagttattggaggctgaacctgttttggtgggggcggctgactttggccatttgattttccggccgaaggaaacttttacggtttttaaggaaccattgggg

SEQ ID NO: 50571 - DNA, 249 bp, Glycine max
  Clone ID: LIB3167-077-P1-K1-H1
cggaaaacccgggcgggcccacaccgtccgcccattataaattttagaaattggttgtttttttttttaatcaagcccagtcgttgtaaggggggcttattctgttaaatgcgaggcttctaaagccctacctgtttaaacccttgggaattaacaaggatcggtccaaatccaagttccgtcttttgccggtgaaaatgcattcaggtaaggcaacgaatccgctagaggaatttcagaatttttttt

SEQ ID NO: 50572 - DNA, 384 bp, Glycine max
  Clone ID: LIB3167-077-P1-K1-H10
ccacacgcgtccggggacaaggaagtttaactcagagggtttcctaaagccgccgaaggagccgaagggttaatttaaccgttccgtcaagcgtgcgtggggtcctgataggcgcgcttttttggaccgatttccggtcgaagaccaacgggcggtccattccggttcgaagggccaacaaggggcaggtggtggggggaacctacaagggccgcgggggcaaaggggtccaggtttatcgccgaagggggttaatcaaaatgaggcgcataacccgcaggagggttaacggttcaaccgtcaacgttggatttaacctttccagggtggtggtaaccaagctttgattggccaaggaccgaaaatcttggttggatcggaagg

SEQ ID NO: 50573 - DNA, 390 bp, Glycine max
  Clone ID: LIB3167-077-P1-K1-H11
ccacacgcgtccgcttaacgcgtgcaatgttttatgggacccacccatgggccaaaaacccgcaaggtttaataggcaatttaggaccaacccatcccccaggtaacggttttgccttggtgttcctgatcccaagatcaggattaacgatgttggcatgaaaaaaaagggggttgataaatttccttttggggtcaatttgtttagttggttgaaggaatacgtttttatggagacttttaaattttttcgtttttttttgattaggttactttccaaattttttataaatgatatttttttattttggatgtttaattttcttcgattaaatttcctatgttttaaaagagtttatttcgattttttgttttttgtttgttattattt

SEQ ID NO: 50574 - DNA, 329 bp, Glycine max
  Clone ID: LIB3167-077-P1-K1-H12
aattcccgttggaccacacccgtccgcatcgaaaaagggaaaattaagatggggatttttcgatcacctttaaatttgcatggggggggggaggcccatggttactagggaatggcccaacctaaagaaagggatggggatcaatcccctttccttaaactccaagaaaactttggcccaaggaggtgacatgggcctcgccaaggccggggaaattcttacttgtgccgaattcggggatggttgcagatttttgaagctccctttggcaattgagatagccagggggtacccttttgtttaaattcaaagagggcccggggggtttt

SEQ ID NO: 50575 - DNA, 435 bp, Glycine max
  Clone ID: LIB3167-077-P1-K1-H2
gtcctatcctggcactataaatccacaccccgttgaaggtcctatgcatattattggggttaaaccaaataaaagccagggccacctccaacttttttatggttttttccgcttccttagcctttttttgggggctacttaccagggaacactcgaccgatcccgtttttttaaccttaaacaggttaaacccagtccacccaaccattttgttccaaaaggaggctggtttttaatcctctggggggttccacctaaccaaagtgggcagcaccggcgggcccacctggggatctttgggtggggccctttacgctgccccaatccaaatttgggccagcaaaaccggcagggtggccagttgggctccatcctttaaattaaacattttcgaacccaccaaataaaactaagttgacgggcttgccttttttt

SEQ ID NO: 50576 - DNA, 422 bp, Glycine max
  Clone ID: LIB3167-077-P1-K1-H3
cccacgcgtccgcccacgcgtccggttggggaggatgacaccaattcgcaggtttggtggcaacgatctttttggtttggcctccgtcaatttggaccatttaaccgaaccattaaaaaggtccttttacaggaccaatttggcaggagggccggactatttccacgttgccgaaggccctggaaatggaataaggggttccatattgggtaaggtggaggggcagggggaattttggcttggccaggtaactgcggggaccgtggttccaaagtttcgaaggcggcagttagccaaaaaactattgaatttgttggaggcacatcagggccaatattgttaaggcttttttggtggacctcttgggggggagcgtaaatgcaccagccttcaagttgtttgaaaggcttggttttgggatt

SEQ ID NO: 50577 - DNA, 439 bp, Glycine max
  Clone ID: LIB3167-077-P1-K1-H4
gtttttcccaatagccaagcacagccaattttttttaattaatttccaccaatctttttgttttgttggttttccatccgcctcaatcggttaggcttaaaccaccatctaattcatatgatggggggaagagggggccatcaagaggggcattctggtgcttttgccgacctttcctttttggttttaaacctccttggctcgcctttgacgttttccgacagggttccgccagcgtaacggcttccggcccaggttaaaatatccccggcgggttccgggtcgttgttgttggaaaaattccctggcgttgttcgctggggggatctgggacgtttttaatggggttcgtgttgatcccctgggtttggggatggataatgctttcttaactagccgaaatcctgtcaaccttttccgttttggccgttcatttttt

SEQ ID NO: 50578 - DNA, 471 bp, Glycine max
  Clone ID: LIB3167-077-P1-K1-H5
gaccggaaataactgggtggaccacacccgtccggttttaaatcggaagcggcccctttttttttttttttttttttttttttttttttttttttttgtttttttttttttttttttttttttttttttttttttttggggggcccccccaatttaaatttgctttttttcatttttaactttggaggggaaaaccccaaaaaaaaattttgggtttgcccccaaaatttttagggaaaaggggggattaaaattattttttttcggggattttttttttgctccaaaaaatggttttttttctcttctttgccacaaaaaaaggggaaaattgggaactaaaagaaagggggtggggcccccccctttttgttaaatttaaaaaatttttttcgggggggttaaaaaaaattccccccccccacctttttttttatttttataaaacccccaatttttgccccaaatttt

SEQ ID NO: 50579 - DNA, 233 bp, Glycine max
  Clone ID: LIB3167-077-P1-K1-H6
tcccgttcaaccacacccttcgcgaagtcgttattgccattgccgttgaattgtttttttaagttgtcctaggccatggggtggttggtgccattgttgggggtcctgtttattactttacctttttatggtttttttccaattttatatttttttcttataaattttaaaattttaatttttataatttatatacaaatttttacttttttccacattttttttaaattttt

SEQ ID NO: 50580 - DNA, 415 bp, Glycine max
  Clone ID: LIB3167-077-P1-K1-H7
ggaaagggtttcctaaaggatctcctcccatgttgttacaaccgtaaaccgggccggggccggcttggttgttccattaaccggcctaaaatccatggctggcttcccaacggggaagaccaacattgccattccttccattgttggcaccgggggaggagtccattgcatgcagggggggccaccaattggcaggaagaagttcgggactttttcttactggccagacctggttgatgcccaattggcaaaggaggtcgaatcctttttaaggaagggatggattccttgcttggaattcgggtgggagcacggtttcggtttccgggggcccaccagtttacctggttcctttgatggacctctctggaccatgtggaagctgcctatgttgggctgcactgatgcttttaag

SEQ ID NO: 50581 - DNA, 426 bp, Glycine max
  Clone ID: LIB3167-077-P1-K1-H9
cccacgcttccgaaatttttaattccaattgttccaactagctggttggacggaaggattgttttttttggtaaagttttttttgaaatggttgtggtttacaagatggaagttgaaggaccacaaaggggccttccaaaaaccagggtggtgatggtggacaggggggaactccttttataagggaccttctggattttaaataaggactggtggaaggggttcccagttttaatttaaattccttttccgagactactaatttttattaggcatgttttaatagatcaagacttagttggttgttggggatactaattaaataaagtttttccccctattgatattatggaaatgggcattggggaaaacttacagttaataaactatttttcccgaaaaaaaaaaaataaacgattttggggg

SEQ ID NO: 50582 - DNA, 248 bp, Glycine max
  Clone ID: LIB3167-077-P1-K2-A1
atttggagcacgccttatgggggttggtcttttcaagttcgtgccatatgaggtaatgcaggagaggactgtgatggcagggggaacttatggatatcttgctccggagtttgtgtacagaaacgagctcacaacaaagagtgacgtatatagtttcggtgtgctactacttgaaatagtaagtggacgtagacctgcacaggcagtggattctgtgtgttgtctaatatatttgaatgggctacacc

SEQ ID NO: 50583 - DNA, 454 bp, Glycine max
  unsure at all n locations
  Clone ID: LIB3167-077-P1-K2-A10
cccacgcgtccgacaaaacagagcaaagagtgtagtgtgtgaaaagtgaaacaaaaaacagagagcaacaatggcgacacttaagggtcctcancctcttccccccgttgcagatgattgtgagcagctccgaaaagccttctcaggttggggaactaacgaggagctgattgtatcgatcttggctcataggaatgctgctcagaggaagcttatcagagaaacttatgcccagacctatggagaagatctcctcaaggccttggacaaagaactcacgagtgattctgagaggctggttcatctttggacacttgattctgctgaacgtgatgcatttttggcaaacgaggcgactaaaaaatggacttcaagcaatcaggttctggtggaaatagcctgcactaggtcccttgaacaattgtttgctgcgaggaaagcttaccatgttctt

SEQ ID NO: 50584 - DNA, 436 bp, Glycine max
  unsure at all n locations
  Clone ID: LIB3167-077-P1-K2-A11
gttggtaatgagaaatgaggatggtaggtattagttaagttagctttatctggaactgcgggttctcacttctcatactctggaagcaaanaanttaacaaccaatggccaccatcattgcttcttcctcatccactgtgctcttctctgcatcctcttcctacctcctcccattttcacacccttctacttcgcgcctttctttctcttcttccctttcctcctcctcctcttctctatcaatttctccttcttttttatcatacacttcttcaaattctacacactttgccactcatgctgccttcagcatcagtgccagcgccgccgataagaagaaggtgctcatctgtaataccaacagcggcgggcatgccatcatttgcttttactttgcaaaggaagctnttggtgctggccactctttcaccatact

SEQ ID NO: 50585 - DNA, 448 bp, Glycine max
  Clone ID: LIB3167-077-P1-K2-A12
ggcaaatttgagcacgggaataggagcagataatcagaaaacaatggccgtagcaagaggaggaagcttctccattcaggccggctctttattcaacaacaagagcttggatagaggttcaccagctggaagattatcgtggcttggggatggtgctgctgccactccacgttataggcaaacttgtgttggggcgcaacagcgacctacatggctcccaggacttgatcccccacctcatcttgatggaactcttgctggagattttgggttcgacccacttggacttgcagaggatgcggcaggcttaaggtggtatgtgcaggcagagctggttcattgtcgctttgcaatgcttggggtcttcggaattctagtgacagatctactttcgcgtcacaagaattagtaagataccggtttggttttgagcttgtgcggtaaaata

SEQ ID NO: 50586 - DNA, 171 bp, Glycine max
  Clone ID: LIB3167-077-P1-K2-A2
cgtgaccatggcggctgcgtttacaagtacaagtgcaacactgagactgtcaaatgttggagagagcagaggtttgcagctgcgtaagtgtaaccctaatcctaataagctgaaggttatgggggggtttggaggttgttctgtagtggtagtggttgttttgtaattttt

SEQ ID NO: 50587 - DNA, 385 bp, Glycine max
  unsure at all n locations
  Clone ID: LIB3167-077-P1-K2-A3
cccacgcgtccgcccacgcgttcgcccacgcgttctcaattccgtgcagatgaagtgtcggcgggtctggtcttttctcttgtcgcaagcggagccccaatttctccttcacgaaccctaattcactcttcccattcgaaatctcgatcaccttttcgattcaacctttctctcctcgctaatctcttcgttcgcctcgcacatcaaggtgagggattgaaattgaatcctcaagatgccagctacagcaggaagggttcgcatgcctgcgaacaatagggttcacagcagtgcancgcttcaaacccatggtatatggcaaagtgccatcggctatgacccttatgcacccaataaggaagacaagaaggattcttctcaaaat

SEQ ID NO: 50588 - DNA, 427 bp, Glycine max
  Clone ID: LIB3167-077-P1-K2-A5
gtttcatttgtgaaactaacaacaacacaatgttcttcatcatggcagctgcttccccaatggcaggccaactcaagtccaccgtggctaggactcttgtagctcccaagggcctctctgcctcttcaccacttcacctcgtgccttctagaaggcaatttagcttcactgttaaggccatccaatcagagaagccaacctatcaagtgattcagccaatcaacggtgacccattcattggaagcctggaaaccccagttacatccagccctttgatcgcatggtacttgttcaacctgcccgcatacagaaccgcattgagcccactactaagagggatcgaggtgggcctggcccacggataccttctggtgggcccattcgtgaaggccgggcctcttaggaacaccgagatcgcccggcaagc

SEQ ID NO: 50589 - DNA, 417 bp, Glycine max
  unsure at all n locations
  Clone ID: LIB3167-077-P1-K2-A6
ggttagggttttctctcttcatcactctctgtgtctctccgtttcaatggctcancaagacgcggaaaacggcgggtgggagggtgccgctgctgctgctacggtgtcgtttgtcgctgtgaagccgcagctcctcgtcgaagctcccaaagccaacgacgccattctgttcttcaaggctgcgtttggcgctgaggaagttggccgtacgctcaaccctaagcgcaaagctgagcacgagctccctctcatactctccgcagaactaaaaatcgctggctccaccattctttttcccgcgcgtgggggatgacacttttttcccagcgaaaactgggggaaacggtgtcgttttgtgcttggagactgatgactttgattgggcattatctaattgcgtgagcgcttgttgcattg

SEQ ID NO: 50590 - DNA, 346 bp, Glycine max
  Clone ID: LIB3167-077-P1-K2-A7
acgaaacccacatcatgagcacactttgtattgcggaaaatatgaaggaggtggaagttggagatggatatgtcttgagggaggagatccatctcacggtgctaaaaacctctctgttcttcgcgggcgatggcttcagcgtctacgattgcaaaggtcaactcgtgttcagagttgactcttatggacccgacactcgcgacatagacgaactcgttctcatggatcctaacggacgttgcctcctcaccgttcgtcgaaagcggccgagtttgcatcaaccgttggaaggttttcaaaggggagagaatggactgtgataaacccatcttcagcgtgaggagag

SEQ ID NO: 50591 - DNA, 277 bp, Glycine max
  Clone ID: LIB3167-077-P1-K2-A8
cccacgcgtccggaagaagaagctaatatgtagtatgagagtagaacccaccaaaggatgtgattgatattcatcctggaaactgaagaacaaaaatagagaggatttcatatggatacaaccaatgcaattcactcaatattagatgtatacatgaattatatttgttaggttatcccatgtattgatgtcctttttctttaacgaatattatcttttaaaagatagtatctggaaaggaaaattgtcaagcaaatagttagttgatttgttacat

SEQ ID NO: 50592 - DNA, 209 bp, Glycine max
  Clone ID: LIB3167-077-P1-K2-A9
aactttttaaaaaaataaattatacattttattttttaaaaaaaaaaaaaaaaaaaaaagggaaggatttttaaaaaaaataggtagagcaaaaacgccctcccttttaaaaaatccaaacttacctacccttccattcaactaaataacttttctataatgtcacctaaattaaattaactgtcccgcttttaacaaccacttaactt

SEQ ID NO: 50593 - DNA, 323 bp, Glycine max
  unsure at all n locations
  Clone ID: LIB3167-077-P1-K2-B10
cgccattctgttgctactattgttccttctttaccaaaagccatcttcttcttccatgtcggggtctctaagctttgtggtggggcttcacagcctgngtgactctggtcccgccaactaacccatcaaaaccttattcacttcttcccaattcagagacaccaaattttccttcccttctgccccttccgcccctgtcacttgcaactatggttctgtaatgccttcatggtttgacattcttgagattcccgtggcagctgattctccaaatgactagagtattttacttaaagctgtggggaatgtgcatgctactatag

SEQ ID NO: 50594 - DNA, 217 bp, Glycine max
  unsure at all n locations
  Clone ID: LIB3167-077-P1-K2-B11
ctcaccaccaagagaccggataacagattcaccactgcatgtgcagataaacggactggccacgcctcccggtttatggagaatgaatagtancaaccgttgcccccttaatttgtgctgtcttatattttactgatttttaatgttgtttttcttattctattgacttctattattcatttcacacaatagtatggaagctagatatttttcaggg

SEQ ID NO: 50595 - DNA, 271 bp, Glycine max
  unsure at all n locations
  Clone ID: LIB3167-077-P1-K2-B12
cccacgcgtccggtctagggttcattcttcttagggggtttcggctccgaagacgacggcgctccccccggaggaccgggggggcacaaacgtggaggaaaaggaggaaccccaatgcccaccgggtctcagacagtacgagactatgatggttttgnggcccgacatgtcctaggatgaacgacttgcactcacccagaagtacgaggaggtgcttgttgctggaggtggcatgtatgtcgaggtttttaacagaggagttatttcacta

SEQ ID NO: 50596 - DNA, 424 bp, Glycine max
  Clone ID: LIB3167-077-P1-K2-B3
cccacgcgtccgaatttaggttctcttaaattaatttcccctcaaaccactttccccacgcgtgggtagtgtgtcgggtgtggcggctctttctccacaattaggtcttggaccgacccttttgtgtaagttcaatggccatggctaagcttgtatgtgttccgcttctggcattccttggcatttccatgatcacaactcaagttatggcaacagattctgcctatcacttggatggaaggagttatggacctgggagtctaaagacctcacagtgcccttctgaatgcacaagaaggtgtgggcgggcacagtaccacaagccgtgcatgtttttctgccaaaaatgctgtaaagcgtgcctttgtgttccttctggcttctttggcaacaagtcttttttcccctcttttcaacaacttgt

SEQ ID NO: 50597 - DNA, 354 bp, Glycine max
  Clone ID: LIB3167-077-P1-K2-B4
cccacgcgtccggcggcatcgttgtttcgttcattcacatctttccctcactctctctctggctgtctgtctctcatgcaagaccgtattcgatatcacaatcggaggagcatactcaaacagagaccatccatggacggtgattcctcttggagtgctcgtctctcttccgcttccaggcgctaccaatccgctcttcaatctcgatcagacatgttcatgggttttgatgaaaatgatggggacgatgatataagggaggagtttctctgcccattttgttctgagtattttgatatcgggtggagggtgctgccacattgactaatagcatccaatggaggcaagaaaatg

SEQ ID NO: 50598 - DNA, 206 bp, Glycine max
  unsure at all n locations
  Clone ID: LIB3167-077-P1-K2-B5
ggaancccggncgaccgacgcgtccggctgttcacaacacaacaaccacacatgacaatagttttcagaacaccctgaatagaatattgtggaattccatgactgctagtgaggaatacaacatatncaatgattacaaaattattcagtctctaaataccaaatttcaagcatccattgcttctaattcttttttttttattttt

SEQ ID NO: 50599 - DNA, 448 bp, Glycine max
  unsure at all n locations
  Clone ID: LIB3167-077-P1-K2-B6
cttcggtggacgagaaatacacgcagtggaatttctttgttcctgtcctctacgactggcgggggaaccacaacctgggctggccgtctctctcttgcaggtggggcccccagcttgaacaagccacttacaagaatcgccagagactctacctttctgagcagactgatggtagtgtgccgaatactctggtgattgcgaattgcgaggttgtgaagcctagtgttgctgctgctgagcacatttcgcagatttaatgaagaggcgcggtccccatttgtgaagaagttacaagaccatcatgcggggtggtgagtgtaacagaatcagtgaattgccacaaaatttcaagatagtggctacacatacagacagccctgatgtccttgctagggatgttgaaattcaacctaancgccatgctgtccttgtagcttcaaaactttta

SEQ ID NO: 50600 - DNA, 394 bp, Glycine max
  Clone ID: LIB3167-077-P1-K2-B7
cccacgcgtccgctttgatcctacaaagcattttgacacaagcattcaataggattggacgcggtttatcgcaacattgggacatgatgcggtaataaagtaaattcttgttgaatatttggataacgatgttatatactcatagtttgtgtgtataaattaaacttatatttattatttactctatatatgtcactctacgtttgtgtgatatattatacagttaagtatttagctatctttgaatatgttaaaggatgatcatattctctagagttgaatatggtgtatacaccagtgtacatggggtattcagggaattatatgtgtttagagctataaatatattaattaattaataatgatgttctagagtgacggatatgttcttttt

SEQ ID NO: 50601 - DNA, 287 bp, Glycine max
  unsure at all n locations
  Clone ID: LIB3167-077-P1-K2-B8
cccaaagtgcttctctcctctgtctttttctttctcttgctatccttttggctagtggcagtgctgcaagtgcaactgcaagaagcncantgccaagccaccatgtttcaacattcaacagaagcctttttccttccactttcctctttggaattggttcttcttcttaccaggcagaaggagcagcaagtgtagattgtagaggaccaagcatatgttacacctacactagacagcatactgaaaagatttgggatcatagcaccggtgacattggagcttatttt

SEQ ID NO: 50602 - DNA, 338 bp, Glycine max
  unsure at all n locations
  Clone ID: LIB3167-077-P1-K2-B9
tgttagtctatgaacagtcaccctgttctgtgtaaaatttccatttccagaacctcgaatgaaactcttctattgctgggtgggatcaatcaattcanttctctcccactcagataggaatgggaatatatctcagcagtccaaaaactgaaaagttttcttaagatcgttaaaatgactgtcttagatatggtttatcgtccatgcaagggtggcgtgcaacaatggaagatgctcatgctgcatatactgatctggatgagtccacttcaatttttggtgtctattattgtcatgggggtggggtggttgcaaacttttttcccaattttttttaa

SEQ ID NO: 50603 - DNA, 293 bp, Glycine max
  unsure at all n locations
  Clone ID: LIB3167-077-P1-K2-C1
cccacgcgtccggtgaaaggatgaccaatttttttttactaaggttgcatacgaggttgggagttgccattgccattgccatggccagtgttnnntggtgcttctcactcttgttctgccactgccactactctgtcaagagcagtaataaggaagtggaattggggaattaagggtcctcgtcgtatggtattgggccttggacttggagtttccttcttgtctatggccggtaccaaatccttcattgcctcggctaagataaagggtgttccctctgttgatttgatact

SEQ ID NO: 50604 - DNA, 244 bp, Glycine max
  unsure at all n locations
  Clone ID: LIB3167-077-P1-K2-C10
cccacgcgtccgggaactttgacacctttggtcattgagttaagtaagccacatcctgagggtgaattatatggtgctgttagccaaaactacatacctnccatcnaattagtttaagcttttattttttttactgacttattcttttttatgtttatnattttttttttttttctttattatttataattatttctcctcatcattttatttttttaatattatcttttttatctcttaatta

SEQ ID NO: 50605 - DNA, 400 bp, Glycine max
  Clone ID: LIB3167-077-P1-K2-C11
agcctgtgtacacaaagtcatctgaagttacttttgcaggtctcaatggccttgaccgctgggcagcatgattagaccttggtcctggtggtgttatcccactccacactcaccctggtgccaatgaactactcattgttctccaaggtcacatccttgctggatttatatcttcaggtaacatagtttatcagaaggtgctaaaaaagggagagctcatggttttcccacaagggttgttgcacttccaaattgctgttggtaagagaaaggcccttgctttttctgtcttcagcggtgggggtgctggcctttaaattcttgactttgcactctttgccagcaatttctccactcctttggtgacacagaccaactttcttgaccctgccatagttat

SEQ ID NO: 50606 - DNA, 91 bp, Glycine max
  unsure at all n locations
  Clone ID: LIB3167-077-P1-K2-C12
ctcttggtgtttaaagattgaaagagctatatacattcctatactaacttctntcgggatggttctttttttaatggttaacaggctttct

SEQ ID NO: 50607 - DNA, 275 bp, Glycine max
  unsure at all n locations
  Clone ID: LIB3167-077-P1-K2-C2
aaaattcttattacacattctccctaccaattttataattcatcttctagtcacactactgcatgttcaaattgcaagtgtggatggttcactcacatacactagtgcatttatactatatctacaatctctgatgtagttttttttatcactcattaatccatnttttccatctacaactaggctttcacaccaacttgtaattttcaagtttaattcttacattattcttctcttagattgtttcattcaaaattatgcttcaaaactatatt

SEQ ID NO: 50608 - DNA, 300 bp, Glycine max
  Clone ID: LIB3167-077-P1-K2-C3
cagcagaacaaatacagatccatccatcaatttcatatttcccttcagctcaccctcaaacggaggtatcaatacacggagggggtgatcctctacatcaacaacagggattgatcttttaccaccaagatacttggtaccgtcatgctgctacttagccttaacccctctaaggcaaacctgtacctcttaatataattcaacacaactactgggaatagttccattaacccaccataaatgctgaatacaatccctctcaagatgaaacacactgattcagaaaaggagctccatgag

SEQ ID NO: 50609 - DNA, 292 bp, Glycine max
  unsure at all n locations
  Clone ID: LIB3167-077-P1-K2-C4
cgtccgcatccccttccatggcagctccttcactctcttcttttctcaactctctctcctncccctgcctgtctttctccttctgcacgggctcccgccacttctttctcctccctccaccctcacaccaaccctccaaacccctctttcttacccttaaatccaaaccctcctactacatttacacatcgttcttcgacaagaatggtcaggtggtagtcttagttggcaaggccaaggaagtcattgccgccgttcataattccgccttcaatgcctgtagtaacatcat

SEQ ID NO: 50610 - DNA, 294 bp, Glycine max
  unsure at all n locations
  Clone ID: LIB3167-077-P1-K2-C5
cgcaatttcatgcttctgcttccctctgatcttcttcaagaagatcccaggagtatctggtgggaggcttctacagtggttgctggtccaccatctattgaaattcctgctggaagtgtgctgagatctgcattgtcaggtggcctatcttgtgccctgncatgtgcattactgcatccagttgatacaattaagactcgagtacaagcattaacaatgtccttccctgaaataatttctaagcttccagatattggaaggcggtgtttatacaagttctctattccttcaatt

SEQ ID NO: 50611 - DNA, 196 bp, Glycine max
  unsure at all n locations
  Clone ID: LIB3167-077-P1-K2-C7
tcttccttgccaatttgagcatatattatcctctattgctatcgatgatcaaatcatgatnnactgggcgattttatatgtaagttttgttgcccccttctcatctttaaccactttttccttctttcaacaaacaattatttttattttttcattcttattactcttttattttttcatattttttcttctttaa

SEQ ID NO: 50612 - DNA, 221 bp, Glycine max
  unsure at all n locations
  Clone ID: LIB3167-077-P1-K2-C8
cccactcttcctgtgttgtttcactattcttgccattgagctttcaaccacttctggaggcagcctctttaactggtttgtttgtaaccatacnatttaatatataaacttnnnnnncttaacatattttacttattttttttttattttatattttattattttttttatttttttattaatatttatattactattattttttattaatttattatttt

SEQ ID NO: 50613 - DNA, 396 bp, Glycine max
  unsure at all n locations
  Clone ID: LIB3167-077-P1-K2-C9
caaaccaacacctttaaaattcaaacttttttccntgctccccaacattggttgtttctacaaattttttgccattatcatttcctacaatttatctccaccttttacttttctctctacatttttatttttttttttacttaacttcacttcatctctgtttttatatttcattttttttctaaacttttttatttattctttattttttattttttcttttttttattcttttatatattctttttttgtttttctttaaattatttttttttattttnttttttttttttctttttttttctttttaatctttttttttctttttttttttaatttttatttatttttatttatttatantattctcatttattatttttattattttttttt

SEQ ID NO: 50614 - DNA, 416 bp, Glycine max
  Clone ID: LIB3167-077-P1-K2-D1
cccacgcgtccgcccacgcgtccgctgacaaccatttagtgttggtgaacttaagaaacagggggattgatggttctaggggggagaaggtactggaagcagttcatatagctgccaataaaaataccgttccaggggatgtgtctgctatggttcctggaggcattcgaatgggaacccctgctctcacatctaggggatttgttgaggaagattttgaaaaagtagctgaatactttgatgcggctgtcaagttagccttgcagattaaggaaaataccaatggtacaaagttgaaagatgtttgtggcggctatgcaatcagatgaacaaattcaatctaagattgctaatctctgtcatgaagttgaggattatgctaagaagttttccactattggttttaacattgaaac

SEQ ID NO: 50615 - DNA, 250 bp, Glycine max
  unsure at all n locations
  Clone ID: LIB3167-077-P1-K2-D10
accgccacgcgtcccnaaaaaaaaaaaaatttattttaaaaaaaaaattaaaaataaaaaggggagggtatatttaaaaaaaaagaaggcaaaaaaaaaaatataatataaaaaaaaaaggggtcgccctttttaaagaaccaaacttaactaccctttgattagaaaatataatcttttttaaagggaacccaaaataaaattaattgccctttttttaaaaacttataaaatggaaaaaacctttttt

SEQ ID NO: 50616 - DNA, 426 bp, Glycine max
  Clone ID: LIB3167-077-P1-K2-D11
ggaaagaagacggcaaatgccttatcatattcacatcaatcttgagctcctggagacagggcatcttgtatctgctatgctgctggaagttcctaatatggcagccaatgttcatgatgcaaaacgcaaactcatatctaagactttccgtcgcttgcttgaggtgagtgacagacaaacattcactggtccaccagaaaatgtaagagatcatgttatggctgccacgaggtttcttagcaagggagacttccagaaggcttttgacattattgtgtctcttgatgtgtggaaatttgtgagaaatcgagacactgtgcttgaaatgcttaaggacaaaatcaaggaggaggcattgaggacatacctttttaccttctctttatcttatgaattcttgtgccttgaacaagttacaaaattttt

SEQ ID NO: 50617 - DNA, 345 bp, Glycine max
  Clone ID: LIB3167-077-P1-K2-D12
agcgaggccccccagggcaacaggatttggttcgagtccagctacgaattctggaacaacgatggctccaccaccaccgccggcggaagcgaccagagcttcgatttccgccagtcggaggacccgccgtcgcagctgatcgggcacttccttcacaagcagcgagccttcggcgagatgcagctcgacatggatttggagatggaggagctgcagcgcgaaggcgacgacggaaagttaacgccggtggatgaatcttcggtgactcaccgtgtttcgagagagcttaaggtttggtgggtggaacctaccttcaatgtgaattttctggaagctcaaaacgac

SEQ ID NO: 50618 - DNA, 284 bp, Glycine max
  Clone ID: LIB3167-077-P1-K2-D2
cccacgcgtccggatggtagaagggtgcttgtgttttttgagcgtgggaggactgaatcagagtgggataccttggcggctaggtggtggactaactactactaaaatctggattgcagaagtttatgagatacatagtgggtggattctacagtcaattctcgcaccttaaatactattgtgcacgtaccaacacatctttaaaaacagcgcattatcaactttaagagctccacacaagtacacagatcccgaacgatcatgtcaacatcctaattaaagcg

SEQ ID NO: 50619 - DNA, 439 bp, Glycine max
  unsure at all n locations
  Clone ID: LIB3167-077-P1-K2-D3
aagctattgtcattgatttgctagctccaatatttttttctagcagattatcattcattggagtgcttgtgcttgtggccgggtgatccatgatcattgactcaagggttgcagaggcacgtaccctgccaaaatcagccttattgccttccaaagttgatatacctactgttgttcctcttccactggtggcaccactgccaaatttgcctgttactctccctccagtgcctgaactacctgcagtacctaaagtaccaattcctgaagtaatagttaataacgccaaaataatcccgggagtgcctatgatctatccagtcactactacttattttgtcacttgctaaattaacttgttgttgccactccagggtggttctggntctgatggggttaatttttgncattcaattacatgctttgtttagtttatatg

SEQ ID NO: 50620 - DNA, 444 bp, Glycine max
  unsure at all n locations
  Clone ID: LIB3167-077-P1-K2-D4
aataactactctctttatttgagacactggtatgcatggaaacctcaaagatctatgctgggctgcaatctttggatgcgtggggctgtcctgcgccactaccattctcgtttgcggctgcacactcaaacccgccaaaaagctcaagccgggtaaaacaccaaagacacccacagtacccgatgataaaccaccattcacaatccctcccattgttaagccaccagtcacaatccctcccattgtcaatccaccagtcacaattccttccatcgntaatccaccagacacaatcccttccattgttgatacaccagtgacagttccacccgttgtgctttcaccaatagtgaagcccccgggttttctccctccaattcttaacccaccaagtacaccaacaccggcgtcgtggaagggagggaacacttcatgttcaccacc

SEQ ID NO: 50621 - DNA, 445 bp, Glycine max
  unsure at all n locations
  Clone ID: LIB3167-077-P1-K2-D5
cccacgcgtccggataactagaaacagtgtgttgtaaatgaaggtccttgttttcttcgttgctgacaattttggtagcatggcaatgccatgcgtacgatatgttccctctccgaatgaacactggctatggtgcccgtactccggaggtgaaatgcgcaagttggaggcttgctgtggaagcacacaacatctttggctttgagaccattcctgaagagtgcgttgaagcaacaaaggaatacatccatggcgaacaatatagatcagactccaaaacagttaaccaacaagcttacttttatgccagagacctcgaagttcatcccaaggacacatttgtgttcagtatagatggcaccgtactctctaatatttcatactacaaaaaacatggattttgggtggtgtaatnnaactcgagcttttatgagatatggtttta

SEQ ID NO: 50622 - DNA, 454 bp, Glycine max
  Clone ID: LIB3167-077-P1-K2-D6
cccacgcgtccggaaaatcctcaattttctgagcagccaaacactctctctctgtctctcgaaagttctcagtttgcagagaaaatctgaatcatgtcgtggcaagcgtatgtcgacgatcaccttctgtgtgacatcgaaggtaaccacctcactcacgctgctatcatcggccaagacggcagcgtttgggctcagagtaccgacttccctcagttcaaacctgaggagataactgccatcatgaatgactttaatgagcctggatcacttgctccaactggattgtatctcggtggcaccaaatatatggtcatccaaggtgaacccggtgctgtcattcgagggaagaagggtcctggtggtgttactgtgaagaagaccggtgcggccttgatcattggcatttatgatgaaccaatgactccaggtcaatgcaacatggtagttgaaa

SEQ ID NO: 50623 - DNA, 445 bp, Glycine max
  Clone ID: LIB3167-077-P1-K2-D7
aaagaaagaaagagaagagaagaatcgttgttctaagatggaggacgcatcagcatcaaagtgcattccacaccaaatgggaggggtccaaaacgacgcgcttcgattcggtctccatggagtcaagagcgacatcgttggttctcaccctcttcaatcttcactccaatctacaaggagaatggatgaagcgatgaagaggcaatgcaaagttaacctgtacggaactgcttttcccatgaaggaggagcttgacaggcaaatcctgtccaggttccagcggcctcctggaccaattccttcttcaatgctgggtttggagactgttacaggaagtgttgatcactttggttttgaggattgtctaaatgacccccgtgagtcagagactttccggccattagacatgcatcatgggatggaagttcgccttggtctatctaag

SEQ ID NO: 50624 - DNA, 441 bp, Glycine max
  Clone ID: LIB3167-077-P1-K2-D8
gagcgtgatgcctttttagcaaatgaatccattaagatgttgacttcaaacaattgggtcagtttggaaattggttgcactagatcttcacttgacctcctaaaggcaaaacaagcatatcaagcccgtttcaaaaagtcccttgaagaagacgttgcctatcatactaaaggggacatccgcaagctattggttcctcttgtgagcacattccgttatgagggggatgaggtgaacatgacattggcaaaatctgaggctaaactgcttcaccagaagattgcatagaatgcctacagcggcgaggacctgatcaggattttgtcaacatggagttaagcacattttacagcgactctaaatcagttcaactatgatgttgggaatgccataaacaaggatctgaaaactgatccaaatatgaatttctgtcttttttga

SEQ ID NO: 50625 - DNA, 388 bp, Glycine max
  Clone ID: LIB3167-077-P1-K2-E1
cccacgcgtccggtgaatggctgaagtggaatagtgttcaggtcatccacatccacaccgtggatgagtggaagctgcaacttcagaatgcaaaagactccaaaaaactgattgtggtggattaatactgcttgctggtgtggtccatgccgttttatggccccagttcttgcatagattgcatagaaaactcctgaattgatcttcctcaaagtggatgtggatgaagtgaggcctgttgctgaggaatatttcattgaggccatgccaacctttcttttcttgaaagatggcgagatcgtggacagggtggttggtgctagtaaggatgaccttcatgccaccatagtcaatcatgcatctgttgttgctgcttcatttttcttct

SEQ ID NO: 50626 - DNA, 113 bp, Glycine max
  Clone ID: LIB3167-077-P1-K2-E11
aaaaaaaaaaacgtgattctctcttctttttttttaaaccacaaaaccaacaaactagaagaggagttttagaagatgggggtgtcgttcactaatctattcatcattttgtt

SEQ ID NO: 50627 - DNA, 440 bp, Glycine max
  Clone ID: LIB3167-077-P1-K2-E12
ggaagatgagagtattgatgctgaagtactgaattctatggcagtttcaaatgagcatttgcatactgctctgggaacaagcaatccatctgctttacgagaaattgttgttgaggtgcctaatgtcagctgggaggatattggaggccttgagaatgtcaagcgtgagctgcaagagactgttcaatatcctgtggagcacctagaaaaatttgagaagtttggtatgtcaccattaaaaggggttctcttctatggtcctccaggatgtggaaaaactttgttggccaaagcaattgctaatgaatgtcaagctaacttcatcagtgtaaggggcccagaattgctcactatgtggtttggtgaaagtgaagccaatgttcgagaaatttttgacaaggccaaacaatcagcttcacgtgttctcttcttgatgagct

SEQ ID NO: 50628 - DNA, 295 bp, Glycine max
  unsure at all n locations
  Clone ID: LIB3167-077-P1-K2-E2
tatcgatccctttggggagataagaaaatgtttcttgtgcagctctcaaccccatttctggacggccatggccatggctcgagccttctctggaaacccagttcggcggtgactcagacccactgggccccgccgagtttgctgcctcaaatcaatgcgangaagacgatgcagggaaaagtggtgtgctccacgaacgacaagacggtggcagtggaggtggtgcggctggcccctcacccaaagtacaagaggcgcgtgaggaagaagaagaagtaccagtgtccactatccc

SEQ ID NO: 50629 - DNA, 370 bp, Glycine max
  Clone ID: LIB3167-077-P1-K2-E3
caaaaatttgagcaacatgaacttaagaccatgctttacaagcacgcacaacacaaccccgtaagggcttctgcttcagttggcaaggctatctcgctgcactctggtatcaacaacaacaagcctccatccgaagccttcttcaggccactacccctacggcaaccaaagaggaccctcttcaccacaaaggcagtgtcaaactccaaggctcaaatcaatgcatctttgaaggagaaggcagttgcaggactcacagcagcttctgtgacagcatctatggtgtttcctgaggtggctcatgctgctggatatgatttctccccttccctcaagaactttctgctaagcatcttttgctggtgggttt

SEQ ID NO: 50630 - DNA, 325 bp, Glycine max
  Clone ID: LIB3167-077-P1-K2-E5
gcgtccgacttaccttttctcttaatccaaatacgatgttctttcatggcaaccacaaccctctcttcggacgccaaactctcatggttggacggaaaacccgtcacatattcttcccgcgtcgcgcccaccaccaaattatcctcatccaaacaaggcacaatttccatgtccctaaccccacccccctacgacctccagtccttcaaattccagcccatcaaagaatccatcgtgtcacgggaaatgacgcgccgctacatgaccgacatgataacctactccgacaccgacgtcttaattgtcggagccggtttggccgggc

SEQ ID NO: 50631 - DNA, 302 bp, Glycine max
  unsure at all n locations
  Clone ID: LIB3167-077-P1-K2-E7
ccggccggaaacccggncgaccgcacgcgtccgggattggataatgacaagtctgttaaataaatttttcgaaagttcctnnagaccatggttgtgtttttataaatgtgtggtttgtaacaaatattaaaatnnaatatatatttatttatattaattttttatatatttaataatttaatttataatattaaatttattttaattattttttattttaaaaatacttattaatataaacnatcttttaatgatttttttaatattcatatgttatttttaaattttatcctcttaaattt

SEQ ID NO: 50632 - DNA, 184 bp, Glycine max
  unsure at all n locations
  Clone ID: LIB3167-077-P1-K2-E8
acagatcatgtggaggactttgcttatatttttggacacgatgcattccaaaactgggagcatcnttttggtgatgggccttatgttatacatggntctgtatgaaaaaaaggtccattattcgatgctacaatcctcataatcatgcagatccaatggacttacaaaatcccatgtataatgt

SEQ ID NO: 50633 - DNA, 280 bp, Glycine max
  Clone ID: LIB3167-077-P1-K2-E9
aaaacagttaaccaacaagcttacttttatgtcagagacctcgaagtccatcccaaggacagatttgtgttcagggtagatggcaccgtactctctaatattccatactacaaaaaacatggatatggggtggagaaatttaactcgaccttgtatgatgaatggtttaacaagggcaatgcaccggcactgcccgagactcttaagaattacaacaagctggtgtcttttggcttcaagattatattcttgtcaggaagaacactggacaaacattcct

SEQ ID NO: 50634 - DNA, 430 bp, Glycine max
  Clone ID: LIB3167-077-P1-K2-F1
aacagaaacaaaagtgcaagaattaggtggcatcaccgatgtgcatggagctgccaacagcgtcgagatcaacaatctcgctcgctttgctgtagaggaacaaaacaaaagagagaattcagttctggagtttgtgagggtgattagtgcaaagcagcaagtggttgctggagtgaattactacataacattggaagcaaaagatggtttgattaaaaatgagtatgaagcgaaggtttgggtgagggaatggttgaactccaaagagttgctagaattcaagccagtcaatgtttctagcacaccaataggtggcattaccgatgtgactgcgaatagcctcgagatcgacattctcgctcgttttgctgttgatcaacacaacaaaaaagagaatgcaaatcttggagttggggggggggattagggc

SEQ ID NO: 50635 - DNA, 199 bp, Glycine max
  unsure at all n locations
  Clone ID: LIB3167-077-P1-K2-F10
ctcactcgaatacataccctttcgtttatactaaaacaaccatcatcaacatcatccgaacgacatttatcactggcgcggggctcctnctcaaaccacctgatggagcctccacctataccaatcttggatttccagcaatggctaatgcagaaaaagctagtttctccattgatgaaaagccttcaagcaattcaaa

SEQ ID NO: 50636 - DNA, 452 bp, Glycine max
  Clone ID: LIB3167-077-P1-K2-F11
tgggttaacaagggcaatgcaccggtattttccgagactcttaagaattacaacaagctggggtctcttggcttcaagattgtattcttgtcaggaagaacactggacaaacaggccgtaacagaagcaaacttaaagaaggctggctaccacacatgggaaaaattaattctcaaggatccacaagatccttccactccaaatgcagtttcatacaaaacagcagcgagagagaaactgataaggcagggatacaacattgttgggatcattggagaccaatggagcgatctcctcggaggccacagaggcgaaagcaggacctttaagcttcctaatcccctgtactacattcagtagttccttcacctctcaacaatctagcttgctcctatctatctatatgtaataagatgcgttcaaataggggcactagcttcactttatgttgt

SEQ ID NO: 50637 - DNA, 453 bp, Glycine max
  Clone ID: LIB3167-077-P1-K2-F12
gctttttgtgttctgcaactgaaagtgtagtaaaagaagcagaaaccaaatcatgtggtcgctactttggagtggcatggcgattgtgtgtagctttcctactccttgagcttggcgttgtgcacccttcaccctcacaccataggatcactcgcttgccgggtcaaccccatgttcagtttcatcagttttcaggttatgtaaccgttgatgacaaaaaccagcgtgcactttttttctactttgctgaagccgaaaaagatgcactttccaagccccttgttctgtggctcaatggagggcctggttgttcttctcttggagttggtgcattttcagagaatggaccatttaggcccaaaggtaagggcttggttagaaaccaattcagctggaactgagaagctaatttgctctatttggaaacgccaattggagttggattcttttact

SEQ ID NO: 50638 - DNA, 212 bp, Glycine max
  unsure at all n locations
  Clone ID: LIB3167-077-P1-K2-F2
cgcccacgcgnccgngggaatggatgatcatcagcatcagcaccaccatgggcacggtttcatgaacgggcggaggcaaccantaaataaccgncccaggccttcccataccaccttccccttcatgcctccctaccccacggaggagctnatcccctgccaccaccacctgaatctcactcccttacctactcatcattcccaacaacaac

SEQ ID NO: 50639 - DNA, 406 bp, Glycine max
  Clone ID: LIB3167-077-P1-K2-F3
atgacattacctccattgctagcaacggtgttatagtgcaatgcatgcaggtgtggccaccagttggcaagaagaagtttgagactctttcctacctgccagaccttgatgatgcacaattggcaaaggaagtagaataccttcttaggaagggatggattccttgcttggaattcgagttggagcacggtttcgtgtaccgtgagcacaacaggtcaccaggatactacgatggacgctactggaccatgtggaagctgcctatgtttggttgcactgatgcttctcaggtgttgaaggagcttcaagaggctaagactgcataccccaacggcttcatccgtatcatcggattcgacaacgttcgccaagtgcagtgcatcagcttcatcgcctacaagccccc

SEQ ID NO: 50640 - DNA, 152 bp, Glycine max
  Clone ID: LIB3167-077-P1-K2-F4
cccacgcgtccggttctttcctcacttcaaatatgtcaaaaatggcaacagaattgggtcggtggcacatcggtcgatccgggcggttggcaaaaaatacgggcccatcatgcacgtatggttcgggtcgagctccgtggtggtgggctcgt

SEQ ID NO: 50641 - DNA, 431 bp, Glycine max
  unsure at all n locations
  Clone ID: LIB3167-077-P1-K2-F5
aagcgcttcattttcttgtcttctggtgcttatataatgacgtactagctagcctcatttgtcgtcatccttattatgggtgtcgctttctttccctatattcattttctgtgctttgaaagatgactggggttcctcaagaagcacccgtttctcttgatcagctcaagcagatactggatgagtttgcaaaggagagggattgggagcagtatcatagcccaaggaacctccttttggctttggtgggtgaagtgggagaattgtctgagatatttcagtggaaaggggaggttccagggggtcttccaaatttnaaagaagaggaaaaggttcattttggttgaaagctttcagatgtgttgctttaccttgtgaggctctcagacattttgttgttgttgattcttgttaaagtttcttcttataaa

SEQ ID NO: 50642 - DNA, 420 bp, Glycine max
  unsure at all n locations
  Clone ID: LIB3167-077-P1-K2-F6
ggaagtgattacaccaatttgaagcgnggcattttacccacgcgagaaaatcccatgcaagctcgtcttcaaaacctccatctctgacgacgttaggcttttccgctttgccctcccctccgacgacctactcatgggtttgccagttgggaagcacatattcctatgtgccaccgttgacgagaaactatgcatgcgagcctacactccaacaagcagcgttcacgaagtgggatacttcgacctcgtcgttaaggtttacttcaaaggggtgcaccctaagttccccaacggtgggatcatgtgtgaacacttggactctctccccattggttctggcttggacgtgaaaggcccacttggtccacattgaattcacttgcagagtgaacttccttgttcatggtgaaccttggtttg

SEQ ID NO: 50643 - DNA, 322 bp, Glycine max
  unsure at all n locations
  Clone ID: LIB3167-077-P1-K2-F7
gaaaaaaagaaaactccccttaaaccttccttcttcatgttcttttcttttctctttgtgcgctaatcaaaaacgcgaccggctgggcaccacaccaccaccatggcagcaagagcaaaaactccccttaacactctctcctctttcacattcacactctntctctcattctctctcctccaactttctctctcctcccccaccaccattcactaccttcttcgctccaaaggcttaccaccgttgctccttccggaggaggtgaaatcctacaccttctctgaaactgggcacctggaagtgttcctggacgcaccattcc

SEQ ID NO: 50644 - DNA, 80 bp, Glycine max
  Clone ID: LIB3167-077-P1-K2-F8
aaaaaaaaaaaaaaattaaaaaaaaattttttttaaaaaaaaaaaaaaaaaaaaaccccgcgcggcctgttctagatcgg

SEQ ID NO: 50645 - DNA, 455 bp, Glycine max
  Clone ID: LIB3167-077-P1-K2-G10
ggctgttccaagaaagcttggggaccatgtggactccacaggagaacaagctctttgagaatgctttggctgtgtttgacaaggacactccggaccggtggctgaaggtggcggccttgattcccggcaagacggtcggcgatgtgatcaaacagtatagggaacttgaagaagatgtgagtgtcattgaatcagggtttattccacttccagggtacactgctgctgattcctttacattggagtgggtcaacaatcaaggatttgatgggctcaggcagttttatggtgttactggcaaaaggggtgcttccactagaccatctgagcaggagaggaagaaaggtgtgccatggactaaagaggagcacaggcaatttctgatgggtcttgaagaagtatggaaaaagagactggtgaaacatctcttgcaattttgtgaccacaagaacacc

SEQ ID NO: 50646 - DNA, 456 bp, Glycine max
  Clone ID: LIB3167-077-P1-K2-G11
gaagttggtggcatcgatataagaaaggcatgtttggtcggaataagattcaaaacgctgggtttttgcagttgcttcgattctctctttctctttcttcagaaaaattaaacccattcaaagaaagaaagaaagagcgatcatttccaatcacaatggcagatcaactcaccgatgaacagatctcggagttcaaggaagccttcagtttgttcgataaggatggcgatggttgcatcacaacaaaggagcttggaactgttatgcgttcgttgggtcagaatccaacagaggctgagctgcaagacatgatcaatgaagtagatgctgatgggaatggcaccattgacttccctgagttcttgaacctcatggctagaaagatgaaggacactgattctgaggaggagctgaaagaggccttccgagtgtttgacaaggaccagaatgggttca

SEQ ID NO: 50647 - DNA, 405 bp, Glycine max
  Clone ID: LIB3167-077-P1-K2-G12
cggataataaggaattgcttcaaagcttcacttcacaatttaaagatgaattcaaaggtgggcgtggatctgtgattggtgtgtcaagagacaagggccatgttctccgtacatcaattgatggacaggaagtgggaagcatccagagtaaactcctatgtaagtcaattctagatttatattttggtgaggaaccatttgacaaacaggccaaagaagaaattgagctcaacatggcttcttacctgtagagttataatgttaaactaagaatcttctctaagacatgaattctgtgcgggggtcaattccgtgcttcgagtaatttttgtttgctgaatcattattattaatttaaacatgttgatgtataccttgagcttcaagattgcaatatgaaattag

SEQ ID NO: 50648 - DNA, 456 bp, Glycine max
  Clone ID: LIB3167-077-P1-K2-G2
ttgaaactgaaagtgtctgaaactgccctactttgaccgttgatatctataaagcactcactctgtctcagctttttttaacaacaaaggggggatgtgaattgaggcaagaccttgcttggcattagcaatagaaaagctgggaagagaatctaagaatcaaaaggtggagttttaagtgttgtgttaataacagaactccgtgacaatggttttgataagtggcaacaacaaaagtattttacaccaaacaaatgatgagagggccaaagcacaaggtgttacagtgcttcagaattcacatccacaaggaaacaagaatgttgaaagcgggcgtacacagaatgcagtcagcactgggttgaccaaagcaataacaacaatggatgaattcaagtgtggatttccatcaaaaggcttatcaaccacatcaaataaatggtggggaaatactga

SEQ ID NO: 50649 - DNA, 349 bp, Glycine max
  Clone ID: LIB3167-077-P1-K2-G3
ccggtctccaccgacatctcttgtattctcttcacaatcccgtgatcccatttcgttccgggcagttcaatctcaatggccgataataagcaacccaatcacgaggaggcaagtcctcttctccaccagtcccaacccaaatccgaaccaccaacgccacctgagactcccgagtttcttctcggatggaccgctgatgggctcccgctgggccacggcagcgtcgtgggccagcccatgggccgcgccccttggaactcctccatctgcgcctgtctcggccaaaccgatcacttctgcagcagcgatctcgaagtttgtcttcttgggagtgtggctccttgtgtgc

SEQ ID NO: 50650 - DNA, 437 bp, Glycine max
  Clone ID: LIB3167-077-P1-K2-G4
ctctttagagagatagagagatagagagagttagagaaagaaattaagaaaaaatggcagcgtgcactgtctactcaacacggtctctgagcacaaattgctccatctcaaccccatcaaagacacagctgagtttcttccaccaaaagcaggtagttttctggaggaacagcaacaggggcaacagcagcagcagaagaagctatgtgataacatgtgcagcaggtgactcacagacagtggtgattggtcttgctgcagactcagggtgtgggaagagcaccttcatgaggaggctgacaagtgtgtttggaggagcatcatagccaccgaagggtggcaaccctgactcaaacacactcatcagtgacaccaccactgtcatatgcttggatgattaccactctttggatagaactggcagaaaggagaagggt

SEQ ID NO: 50651 - DNA, 390 bp, Glycine max
  Clone ID: LIB3167-077-P1-K2-G5
atcagctcttcgagcccttgctcgttcaggtatgaaaattggtcgtatagaggatgttacgcccattcctttggatagcacacgtagaaagagtggtagaaggggtagaagactttaaacttcctattctggagttgctatattttacttttaatgccaaagagaattgtggccttttgatgttttttaagttaatatcagaacttctattgcatttcttgaggtgttgaacagaattttagttgagtacacatttaatcattgttgtcagagattttttaaagttgagcatgttgcgggctgggtgtggttgattattgttttttataatacggttcttcctttcggttacttttaagcattgaatgtattattaatctattcgttttt

SEQ ID NO: 50652 - DNA, 296 bp, Glycine max
  Clone ID: LIB3167-077-P1-K2-G6
gaacaacatgaattttctaaccttcgttacttttctactcttcatactaccagcaacctcgtcggcccagtatttggggagagaaccttctcactcatcgcaagatattcctaaaaaaagacaacattattacctcgtacgctgtcatctttgacggtggtagcacatgaacccgtgtgcatgtcttccattttgaccagaatttggatctccttcccattggtgatagtcttgagcttaataaaaagatcacacccgttttaagtgcttactaggattatccctatcaaacttca

SEQ ID NO: 50653 - DNA, 333 bp, Glycine max
  Clone ID: LIB3167-077-P1-K2-G7
gtaaccataagttcttatgggctgtgagagtaccaagtaatgtagccaatgctacatataggggtgaacaaaaacacggggacgccgttagtagttcatgccatgtgggtttttggagagaaccaaagagaaaggcatggtttttccttcatgggcaccccaaattcaaatccttagccacagttcagttggagggttcttgactcactgtggttggaattcgatccttgagagtgtgctaaagggtgtgccattcatcacatggccactgtttgcggagcagaaaatgaatgcgattttgctatgtgagtgtctcaaagtgggagtgaggcc

SEQ ID NO: 50654 - DNA, 413 bp, Glycine max
  Clone ID: LIB3167-077-P1-K2-G8
cccacgcgtccgcccacgcgtccggatcgtgttaactagaaacagtgtgatgaaaatgaaggtccttgttttcttcgttgctgcaattttggtagcatggcaatgccatgcgtacgatatgttccctctccgaatgaacactggctatggtgcccgtactccggaggtgaaatgcgcaagttggaggcttgctgtggaagcacacaacatctttggctttgagaccattcctgaagagtgcgttgaagcaacaaaggaatacatccatggcgaacaatatagatcagactccaaaacatggtgagcgacaggcttacttttattccagagacctctaagtttcatcccaaggacacatttgtgttcagtataaatggcaccggacttttttatattccatactacaaaaaaca

SEQ ID NO: 50655 - DNA, 402 bp, Glycine max
  Clone ID: LIB3167-077-P1-K2-G9
cccacgcgtccgttccttttctacaattcttatatttgtaacctgctctcaaaaaaggagagaaaaaaaaacagagctgtaagtgggtcggtttttctgcttaaaatttctgttttggtctgaaatttctttgtttttggtcgtgccagtgctctatgagatagaatctgcgcgagaaagcgacaccaatccttgcaatagagatggtggttaccagaaatattgtgttgttactgctttctattacttttgttgctccaattgtgctctacactgatcgttttggcaccttcaagtacccgtttgctgagcaagagtttattgatgctgtaactgcttttgggagtgcagctgactctggccatttgaatctcctgccgcaagaaacttttacggtcttta

SEQ ID NO: 50656 - DNA, 211 bp, Glycine max
  unsure at all n locations
  Clone ID: LIB3167-077-P1-K2-H1
gccattcgaaatctgacaagatcgtagctattatatttcatcaataccatgtacgctaaaggggtgttactaccgaatacgctgagcattctaagacctaccgtatgaaacatctttcaactaacaaggatcgngccaaatccaaggtctcgctgttttgccgagaaaattgtataaggttaagaaaagcattcagcaagtgcttgccata

SEQ ID NO: 50657 - DNA, 381 bp, Glycine max
  unsure at all n locations
  Clone ID: LIB3167-077-P1-K2-H10
cccacgcgtccggagacaatgaagtttaactcaagggtttcctcaagccgtcnaaagaggcgcaaggctcactggaccggtccgtcnagcgtgcgtcgcgtcctgatgagcgcgcctctctcgaccgatctccggtcgaagtacaacgtgcggtccattccggttcgcaaggacgacgaggtgcatgtggtgaggggaacctacaagggccgcgagggcaaagtggtccaggtctatcgccgcaagtgggtcatccacatcgagcgcatcacccgctagaaggttaacggctccacgcgggggtgtgggcgttcacccttccaaggttgtcgccaccaaactttttatggacaaggaccgcatattcttgctcgatcggaa

SEQ ID NO: 50658 - DNA, 402 bp, Glycine max
  Clone ID: LIB3167-077-P1-K2-H11
cccacgcgtccgcctaacgcgtgcagtttatagagagacgcagccatggggcgaaggcccgcgaggtgttataggcagattaagaacaaaccataccccaagtcacggttttgccgtggtgttcctgatcccaagatcaggatttacgatgttggtatgaagaagaagggtgttgatgaatttcctttctgtgtccatctggttagttgggagaaggaaaacgtttctagtgaggccctggaagctgctcgtattgcttgcaacaagttcatggccaaatttgctggaaaggatgctgtggacttgagagtcatggtgcacccattccatgttcttaggatcaacaagatgctttcgtgtgccggagctgataggcttcaaactggaatgagaggtgctttt

SEQ ID NO: 50659 - DNA, 366 bp, Glycine max
  Clone ID: LIB3167-077-P1-K2-H12
catcgtacaagtgattattcacatcgttatttttccatccgctctcaattttcagtgcgtgagtgaagcacatggttacttcctaattgcccaacctaaagaaatggattgtgatgtataccgtttacataaactccaagaaatctattgccgcatgaaggcgcattggcctcgccaaagtctgcgaaaatcctacttgcgccgaaatcggtgattgctgcagctatctgaagcttccttttgcaattgagatagacaaggcgtacccttgtgatttcatgcaaagaggacacgtgagggtgttgcttaagaacgaggatgggactctattttatttccttcatctcatcaagaaagcaacttatg

SEQ ID NO: 50660 - DNA, 410 bp, Glycine max
  Clone ID: LIB3167-077-P1-K2-H2
gtcctatccttgcactataaatacacaacccgatgaaagtcctatgcattatatttgagtggagagcaaatcaaagccatggggacctccaacttctctattgttctctccgtctccctagccttctttttggtgctacttaccaaggcacactcgaccgataccgtttctttcaccttcaacaagttcaacccagtccaaccaaacattatgctccaaaaagatgctagtatttcatcctctggggtgttacaactcaccaaagttggcagcaacggcgtgcccacctcgggatctctcggtcgtgccctttacgctgccccaaatcagatttgggaccagcgaaaccggcaaggtagcccagctgggctacattcctttaaattcaccaattttcgcacccaacaaat

SEQ ID NO: 50661 - DNA, 410 bp, Glycine max
  Clone ID: LIB3167-077-P1-K2-H3
cccacgcgtccgcccacgcgtccggtttgtgtatagatgacgacgattcgcaggttttgctgggcgatcttcttcgctttgcctccgtcaatctcgaccatctcaccgaaacattcaacatgtccttctacatgacctatcttgcaagatggcctgactatttccacgttgccgaaggccctggaaatcgaatcatgggttacattatgggtaaagttgaggggcaaggagaatcttggcatggccatgtaactgcggtgaccgttgctccagagtatcgaaggcagcagttagccaaaaaactgaggaatctgctggaagacatcagtgacaatattgataaggcttttttttgttgatctctttgggagagcgttaaattcaccagccatcaatatgtattgaaaagc

SEQ ID NO: 50662 - DNA, 395 bp, Glycine max
  Clone ID: LIB3167-077-P1-K2-H4
gtttctaccaatagcccaacacaaccaacttttttttatttatttccaccaatcctcttggggtggttgtttttcattctgcgtcatcggataagcataagacaccatcttattcatatgatgaggggaagaaggagacatcaagatgagcaatctcgcgctttgtacgacctctcctctctcgttctcaacctccttcgctcgcctctgacgttctccgacgaggttccgccagcgtcacggcgtccgggccaggctcagatatccccggcgggattcgcgtcgttgctgctgggaatatgggtggcgttgatgctgttgtgatctgtgacgttctttaacggtttcgtgttgattgcctgggttctgggattggtcatgctcttctacgtcgc

SEQ ID NO: 50663 - DNA, 131 bp, Glycine max
  unsure at all n locations
  Clone ID: LIB3167-077-P1-K2-H6
gagtcggtagtggcattgtcggtggagtggtttgtggaggtggtctaggtcatggtgttggtggtgtcattggtgggggtgcaggtaataacagaagcatnggattgggatgtttttttttacaacataca

SEQ ID NO: 50664 - DNA, 413 bp, Glycine max
  Clone ID: LIB3167-077-P1-K2-H7
ggaaatggcttcctcaatgatctcctccccttctgttaccaccgtcaaccgtgccggtgccggcatggttgctccattgaccggcctcaaatccatggctggcttccccacgaggaagaccaacaatgacattacctccattgctagcaacggtggaagagtacaatgcatgcaggtgtggccaccaattggcaagaagaagttcgagactctttcctacttgccagacctcgatgatgcccaattggcaaaggaagtcgaataccttctaaggaaaggatggattccttgcttggaattcgagttggagcacggtttcttgtaccgtgagcacaacaggtcacctggatactatgatggacgctactggaccatgtggaagctgcctatgtttgtctgcactgatgccttct

SEQ ID NO: 50665 - DNA, 392 bp, Glycine max
  unsure at all n locations
  Clone ID: LIB3167-077-P1-K2-H9
cccacgcgtccgcaatttttcattacaactgttacaactagctggttggacggaagggatgttgtttttggtaaagttgtttctggaatggatgttgnttacaagattgaagctgaaggaacacaaagtggcactcccaagagcaaggttgtgattgttgacagtggtgaactccctctataattgtacttcttgattctcaatcaggacttgttgaaggtgttcccagttttcatttcaattccatctacgagactacttatcttttataagcatgttctaatagatcaatgactaggtgtgtgtttgggatacttattagataaagttttttcccctaatgataatatggaaaatggcatttgttgtaaaaaataaattttttatatttt

SEQ ID NO: 50666 - DNA, 237 bp, Glycine max
  Clone ID: LIB3167-078-P1-K1-A10
acacccttccgccaacccttccggtgctttcccgctttcttttcacttcaaccgatttcctctccggttcggcctaaatattcagagggggggttaaatccattaaacatacattctaagttaatttttaatataagtaataacactcatttatttttctttaaggtaaaaagaacttttccatcaaatgaaattccaatcttttatgatactttatgattttatttttaagttttt

SEQ ID NO: 50667 - DNA, 474 bp, Glycine max
  Clone ID: LIB3167-078-P1-K1-A11
cggcaggaccgggcccggaattccggggcggaccacacccgtccgaaataaacgaggattctaataatctccctaatttttcctctcctctctttctccgaggcttttgtcctaaattttggggtggcaaataatgcaggtccaattggacctgcaggatattcttgcaggaggccttaaagggtaacagcaaatgattttgttaacaggggcctgggcattgttggtaccacctaaaacattataaaagttgcagggccccttgcattggaggctaagttggttggtttaaacggtttgggcatttccgaagaacgtttggactaaccaccagggggggtattacaatttaacactaatccggaagcttaagaataactggtggtaattgaagggggcatcttagctggattaattcttttggccaccattgtttacttaaaaactcttaagaagggggatgttatggcattc

SEQ ID NO: 50668 - DNA, 340 bp, Glycine max
  Clone ID: LIB3167-078-P1-K1-A12
acacccttccgaaggcaagtatgagttatcaaaacattcattttcccaaacacaatgatcacgggagcggtggtgttattcctagggggtttgggagaccatccaccttgctacgcggaattaattgttcaagcaaaaagaaggtttggaaacataaggggatgagatttggcctcctgacaattctatggtgcccgaattcattttgaaggtccattatccgtggatccagcttttatggcactttgcccacacctcttacctgattggggcctgttaaaagtgtttgtgggcggcctttaaatttccggggcattaaaaacatcgatttgacttggtt

SEQ ID NO: 50669 - DNA, 465 bp, Glycine max
  unsure at all n locations
  Clone ID: LIB3167-078-P1-K1-A5
cgaaattccgggtccgcccacacccttccggagggcttaccaattaccaaaaccccacctttatctaccaccaaaccaaagaaagggaagggaaggcttgggttacctgggggggcgaagggggaataaaacccaaccccaccctgaagcaaagtcgaccggcccaaactaaacgaaccccttaactgaggccccagggttgaacggccccggggaggttccccggcccttgaacacaaccgatttgattttcgggttgggctccggggccgcctccaacgccagggtaacgctggccggctatggccccgcttccgaagacctaaagccctgccgttgggggatcctccccgccgtccagtccaacgcccccaagttccgggtggttttttgtttttgttaccaaactttttttttttttttggccgttggtgggatcaaattnaatcaacttttttttttttt

SEQ ID NO: 50670 - DNA, 332 bp, Glycine max
  Clone ID: LIB3167-078-P1-K1-A6
cacaggcgtccgccacatttcctggatatctaagtaatcaaatttccttatttaacccctaaattccaagcaggagggtttagaagaagcaccaccaccacttcaaccaccacaggggcgatgattggcctggcagggttgataataggaggggggggaggcaccacaggcattttgggcaccttggggaacttggtgctgcggttgccgtggctaatcccttgcatgagaagcaggtggccaagaaggacccatagcttgctaacaggcacagggttaaataggagattgcggcagcatttccttgtggggtggggggtgttgttttttat

SEQ ID NO: 50671 - DNA, 380 bp, Glycine max
  Clone ID: LIB3167-078-P1-K1-A7
ccacacccgtccggaatatggaggggttaaaattaattgcaaagcccctgtttgggaggaccttgaaagggaccgatgcttttgaggatcctcttaatgttgggggggttcgggatcttgttttttcctttgccaaaaaggagggccttttttccaatcccaattcattggaaattgttgggcttgttgggtttttccatgacttagttgcttccaaatccctaagggcccaatttggggaaaaaattggggggaattttcttgatgaaaaggggttttagggggccaccaggttcaaaattttgaagatcttcaaaggattggttttttgggaggaagtgttagggaaggggaaatttgttaggtttttccagaatttt

SEQ ID NO: 50672 - DNA, 341 bp, Glycine max
  unsure at all n locations
  Clone ID: LIB3167-078-P1-K1-A8
gggncnggaattccggggcggcaccacacccgtccggaattttttcacacagggccttaagttgttttaaggattttctttttgaaaacttggggttggattaatatacccaggttttaataaacccaaaaatggcagtgtaataattgagttggggggcctttatgagaatattaagttccaaagttttgtttgttgagaaggttattgaccagacttttgttccaagggttaaacttgcttatgctttcccaggacaggggtttggggtgtatataattcctgaggcacaaaaggatgaggggtttttggatggactggttggttttttgacaaatttt

SEQ ID NO: 50673 - DNA, 252 bp, Glycine max
  Clone ID: LIB3167-078-P1-K1-B4
acagccgtccgatttgacttttgaataagtccgcagggtttttttgttaatatggtccatatccaccactgggccgggcccacgtgggctaccattgttctcacttaaaaaaaaaataccaaatgtttcttaattggtttcaaaattaataaattatttaatattaaaaatgggggggccgttttaggggttccaggttttcgtcctctttctggcaacgtatatagttttttatttggtgtacttaattta

SEQ ID NO: 50674 - DNA, 257 bp, Glycine max
  Clone ID: LIB3167-078-P1-K1-B5
attttgttggcagttgggtttaacagggccaccattggcagttggtttgatgggccagggagggaggtaatattgggcacaatttggggtaaaatgctaataatggtgcattggatcacagacggggttggtttgggtggcacattgatgtttaaaaccattggaggacctaattaaccaaaaatcattaaggcttttgctttgggccagtggtaattattgacttttgccaaattaattatgaatggcatttttta

SEQ ID NO: 50675 - DNA, 412 bp, Glycine max
  Clone ID: LIB3167-078-P1-K1-B6
acagccgtccggggatgggtttttttttccactgttaaggggaggtttaaggggggcaccacaaacaccctgaaatccttgtggggtaaggtggccataaccgccgaaaccctaaggaccgggtaagatattttggatgcagttaaaaaaatcggggtcgaagcggtttttttaccagccgtggttaaaaagaccattgccgaagttaaaatgaagattaattttttggttgcagatttttccagcaggactaaaaaaatttcagggccatttaaggatgtcattgatgcaaggggacgggaccgggttattttggcggtgtgaatgctttttttggcatttttgggatcttaattttaaatattggggttgcagggcctggattccttttgggtcatggtcggtgggattc

SEQ ID NO: 50676 - DNA, 273 bp, Glycine max
  Clone ID: LIB3167-078-P1-K1-B7
ccacacgcgtccgccaacccgtccttttatttttccgccaacgcgtccgaacaaggggaggggttatcattaggggcggcaccacctagtttaagttgaaatggcttttcaagggatggcatttggggccttaaaacctgcccctttaactgtggagaagtcctaatgggggggctatccctttttttaaaggaactttttttaattcaaagttggggccaggggcagtaatatcaagattttcaaactctttggaattaatggtggcatgtt

SEQ ID NO: 50677 - DNA, 281 bp, Glycine max
  Clone ID: LIB3167-078-P1-K1-B8
ccaacccttccgaattggaagggattgtttttaaagttgtggaagcagaaaaggtaagtggtgacatttccttggtgggtggcattggaaggaggaccttgttgtttgtttgggtggaggttttagattgttttgttattggattgtagttgtctattgtatttttttcttttttcccttttgtctttattatatgattttttattattttggttattaatttttttatttcattattattttgttcttttatattatattattttgtataattttttttt

SEQ ID NO: 50678 - DNA, 129 bp, Glycine max
  Clone ID: LIB3167-078-P1-K1-B9
acacccttccgccacacccttccgaaaagttagagaataaatatattgccttcaccaccatctggtttttgtgttcaattaaatgtggcgggggccaccacaaactaatggttgtctattttaaactca

SEQ ID NO: 50679 - DNA, 361 bp, Glycine max
  Clone ID: LIB3167-078-P1-K1-D10
aaccggcccgaaattcccgttcggaccacacccgtccggagttttaaactatgtaaataaactttttttgtagcctgccaagtccatctgaaggggcggggttaacttgtaatagggttgccaaaatcccaaacattactttaacaatgggaaataaactttttgtcttaacaccagaccagttttttttaagaactggagaaggttttccagaagcttgcctaagtggtttaattgcttttgatgttcctcctccaaggggcccatgggggttttttgtcaaggttttaataagggcttttaaaaccgcttttgcctatggaaatttctaagtggggttggtgtaattatttataatttt

SEQ ID NO: 50680 - DNA, 411 bp, Glycine max
  Clone ID: LIB3167-078-P1-K1-D4
ccacacccttccgttggcaccaaattaatttataattttcctgagcgacctaataaataaaggctgattccacttttgcaggaggataataaagctgccaaaccacctcgcaaggggtttaattggtttgatgataaacccagggttggtcctgatcctgaatggaagaactatattgggagggttgggagcatttttggggtctccgtggatccaaagctggccaaattccaggaaagggatttcttagggttgattttctttcctgtggggaatgaggctggccggttccttgatgaaggtatcgcagtcaaagcaccaaaccttgttattttggttataatgggcatgggttttcccccttacggggggggcataatatcctggccgtgtttttttggatccaggtcc

SEQ ID NO: 50681 - DNA, 207 bp, Glycine max
  Clone ID: LIB3167-078-P1-K1-D5
gtccgccacacccgtccgacaatttagggtttaggattttatccaaaccccttttccatggaagaggaggcggccctggaggtggtggatccaaacaccgccgttgccgccgccgccggggccatggccgtcaggatggccagggccggcgtaaacggtcccttgcctaacaagaacctcgccaggggggaaggggccccccaggcg

SEQ ID NO: 50682 - DNA, 250 bp, Glycine max
  Clone ID: LIB3167-078-P1-K1-D6
attccgggtggaccacaccgtccgtccacctgttgagaacaaaacggggcaattttttttatgtttatctttccaaagagggtggtggatataaacatggggttccattgtttaaaattttatcttttaggttcaataacttgctttctaaggtagttttgtattaaaactttttaaaaatatataatataatggggggtctctcttttttatccaatttttttacctgttctttttatttttaattttt

SEQ ID NO: 50683 - DNA, 313 bp, Glycine max
  Clone ID: LIB3167-078-P1-K1-D7
acacccttccgccacatccttcacctaaccaggcctttaatttttttaaacctcacccaagattttggggccgggggaactgttccaaagagaacaggttctgttcaacctttccaaagataacaatcctcaaccaagctagatcaaaaggtttttttccaaggcctaacaaccatcaaaaattttcaccgcataattaacagaatttaggtcttaaaaaccatgtaaacgaaacttcctctttttttaatcccaatttgcagtcttttctaagttttacagaaggcagccttccttaattcccatccaattt

SEQ ID NO: 50684 - DNA, 222 bp, Glycine max
  Clone ID: LIB3167-078-P1-K1-D8
attcccgttcggcccgacccgtccgttacacctaattgctgtgaatcttttttatttttaaaacaaaatctgtttttaaaatgggcgcaattttttataattgggtggggaaataaaaatttgttcctttttagttaccaataaagcttttccaaaaggcatttcagtaaagtgtcaataccaaatattttattgttgtttcccccccactctttaaaaact

SEQ ID NO: 50685 - DNA, 212 bp, Glycine max
  Clone ID: LIB3167-078-P1-K1-D9
acacccttccgccaccaccaggtccgacccaatcctaatattattataataataatcctaacgggtaaagaggtaaataaaagggggcgggcttagtaataggctaatagggtagtagttctttaatgttgggaagttggaactccttaagcagttttagagtttgtgaatttggatccggatgaagaattaatcctttttttccctttttt

SEQ ID NO: 50686 - DNA, 199 bp, Glycine max
  Clone ID: LIB3167-078-P1-K1-E10
accacatggcaaggaaaatccacattccattcctaagccttggttaatttgagtggtagggagggttagcctaagggtggcaggtgtggttgctgggatgtccatggttgggggggccataagtgctgaacccatggcacaggctgaattcacgtgcggtctgtttgtcggcgccatgttttcgggcttaagtattttt

SEQ ID NO: 50687 - DNA, 215 bp, Glycine max
  Clone ID: LIB3167-078-P1-K1-E11
cccacgcgtccgagaggggccagggtgcatttttccttttaccgaaactttgggaaaactttaaggaagcttggtggtcggtccgagagggagcgtttggaccccgggttgaagctggtcggttggtccggacttggttgcaggggggggtggtggggggttaatttccttttaagccttttttgtattatctttggattttttttgtctttatt

SEQ ID NO: 50688 - DNA, 327 bp, Glycine max
  Clone ID: LIB3167-078-P1-K1-E12
tggattggaccctggccaaaaaaaaaaaaaaaaaaaaaaatttattatttaaaaaaaaaaaaaaaaaaaaaagaaaataaaataaaaaaaaaaagggaaaaaaaaaaaaaaaaataaaaaaaaaaaaaaaaaaaaaaaaaaaataaaaaaaaaaaaaaagggggggccccttttgggggcccaaacttactttcccttctttgtgtctaaaaatttttttattgggggccccttatttaaatttatctggcccggttatttaacatcggggccggggaaaaccctttggttccccaataatttttttttagaaaaaattcctttttt

SEQ ID NO: 50689 - DNA, 248 bp, Glycine max
  Clone ID: LIB3167-078-P1-K1-E3
tccgcccacccgtccgtttggaaggatttaatccattttatatttttaaaaatgcctgggataaactaaggatttcatatttggtgaccggggacaaaaccctattggaaggctgggcctttttgaaagaaaaaaactttgaaggggttttccaatttaccaaagcatttgtgattgccagccttcgatacccatgtaccgaatccatggtttaacattgttttaaccatggggatgtttgttaattt

SEQ ID NO: 50690 - DNA, 294 bp, Glycine max
  Clone ID: LIB3167-078-P1-K1-E4
aaaacatttttgtggggtgggacctcaatgtaaatgtccgttgccattaacaaggcctgggttttaactgatcaagcataacctaaggatcttgtaagggggggggttgctgttaaggacccatctgttcccaatggagtccgtttttggattgaggcctatcctaatgcttttgttgggctagagtaatgggttgccatcaagctctggtggcaggaatatttttaattttcctccaagtaagattgggacctccaaaaggcccctgaactccaagctttggtggaaggacct

SEQ ID NO: 50691 - DNA, 375 bp, Glycine max
  Clone ID: LIB3167-078-P1-K1-E5
cgcccgaaattccgggtggacccagccgtccgaatttttttgtaaacgggccaaattaagaataattcaagattggcaaccgaaccagcagaagcaacttgatctttaagggggacgcgcttcttgaaggccaataccggggcggggggggggcaggcccggttggggtttgtcaggaaaaaagcctccgcccggaggaaggacccaagggggccgggcactacctataataggcacccttagaagccggggaaaacaaaaaggccagggtaacttgattccccgttcttgaagcttggttcttccgttttgggtcaattttttagagttaagagggtaaataaaaattggaggtttggtggggtccaattttaa

SEQ ID NO: 50692 - DNA, 409 bp, Glycine max
  Clone ID: LIB3167-078-P1-K1-E6
gatccgcgtttttaaagaattccaaccaatttgcatattggttccaacattttatgggggtcaacccggtcccttaccaaaggaccatttggggattaacatggggggggtaacagtaaaagaggcacttagtcctaaaggatttttcattttagattcccaagatgctttcatccaatatttgccggggttaaacagcctacttactgcaaaagctattgccacagggccaatcttgtttttgaaggaggttggtcctttgaggccacttgtttttgaattaagcaacccacatccagatggggttaatttgggtcctgggagattgggggtgttgcctgcaactgaaggggttgttggtccaattgggttattgtccaaggttaatgttattgggaatgattttgtt

SEQ ID NO: 50693 - DNA, 429 bp, Glycine max
  Clone ID: LIB3167-078-P1-K1-E7
cgccggccggcccggcccggaattccggtcggacacacccgtccggttttggtttttaacggtggactttgcggtttttaatctttccgccatttccgatctttgcaatgtccttgataacatcttcctcaaccttttcctgagaatattgaaggctggaaggctgcctgagaaggttctgggccttttaatggcacctggtagggatgaagccttttaattggttcaggccctcattatccaccatttttggaccccggtgcttccaaccaggggttttggggcaaaataagactttaagttggtaggatggttgtgcccttggaggaggtctaaggcggtattcaccgtaattgaaggggtcattgtatttggggccctgatttctgtctctacacctttaatgaaggattggtggccaatattttc

SEQ ID NO: 50694 - DNA, 373 bp, Glycine max
  Clone ID: LIB3167-078-P1-K1-E8
ttatggtttggcccttgtggttaagtctttgttcgggaccgaagatggtgtttccatggtggttttaaacctaatgacccgggccaaattcttaatggaaggttggtcctttttgaaggatgcatcccttgaagggggttttccttttaccaaagcttatggattgccagcctttgattcccatggaccggatccagggtttaccagggttttaaccatggggttggttgtctattttaccatttcattgaataaaattcttgggccctacataggctttgggggacttaaatccctggtggatgttgggggagtacctgtttctttatttaatatgtattttttaaaattttctcttttatggtaattaatt

SEQ ID NO: 50695 - DNA, 381 bp, Glycine max
  Clone ID: LIB3167-078-P1-K1-E9
cccacccttccgccaacccgtccggtcttattgggtggtttaactccggaaaaaccaaccgggtttactttccaaagggttcttttgggcaggtttcgttcccaaaggttaaggcttgaaaaagggtgggttggtgaaggggaaggggggccaaggggttggtttaggttcaaaggggttcccattaggggagggttaagattcaaaatttaaggctggagaggactttgggggaaaggggctgggctggttttttccatgggaatttaatttgccaaagggttgaaaagattaagggagggtcaggtccattttggtgccctttttgttgggacctactggtcaatgcatgtaaaccttgcctaatttaagggctttgaa

SEQ ID NO: 50696 - DNA, 85 bp, Glycine max
  Clone ID: LIB3167-078-P1-K1-F1
ccgaaattccgggttcgaccacacccttccgccaacccttccgcaagggcaaaaaccgaattaaacttttttgaaaaaattgccc

SEQ ID NO: 50697 - DNA, 419 bp, Glycine max
  unsure at all n locations
  Clone ID: LIB3167-078-P1-K1-F10
acagccgtccgcccacccgtccggaggaaatgggggtccattggaggtaaagtcccggaggaattgggggaaccagagttttaccaggatttaaacagcttgaccaaacaccaccttccaactggaccaggtttaataaaagtagagaaaaagggaaatgcctttaacataaaaccagataatgccactggtggccataattttggcaggggcaatccagcacccaaggatggggttcctgttccttcaactgaggggggtttaaattaaggcaaacttaacaggagtgccacctagaaatgggggaggggttccatgaaaatataaatatttaacttttttttaaaattggggggattccatgtgtggtttaaaattccattccaanattttttanttttatttttttatatatttat

SEQ ID NO: 50698 - DNA, 443 bp, Glycine max
  Clone ID: LIB3167-078-P1-K1-F11
cccccggcggacccggcccggaattcccgggccgcccacacccgtccgaggttcttaatccacccagcccggtcccatatttaagccaggttgggtggcctaattggatatttgaggcttggggtttttaataaatttatctagttaaaggaagggattggaaggtggggtttgtaataagtttctccgttgggccccctgggaggccagccttttttatccaatgggcggatggattgggacctttgaaggtcctgatgggttggatttttttcctttaatccgattttctggtgggggccaagaataagggccctcgggtaaggagaccgatggcttagtatcttttttcccaaagggatttttgggccagttccggttaaaattaattaatgcctaaatgtggtttattgttggctttaacctcaaaattcataaggttt

SEQ ID NO: 50699 - DNA, 385 bp, Glycine max
  Clone ID: LIB3167-078-P1-K1-F12
cccacccgtccgggcaattggggttaacagattattcatattagattcccatgaggcattcttcccgaattggccgaagataaacagcctacctatggcaaaggctaatgccacagggccaatcttgttttggaaggacgagggatctttaaggccactggttttcgaattaagcaggcctgcaccagtgggtaagggggtgtggcctgcaccagagggggtggggatttaattgggtggtgggccaaggctaatgtcatggggaatgactttggttataattaagctattaggccatgggttaaatcctcatgcagggatggagccattggccttagcaccaaacaggcatttaagggggcttaaccccattataaaacttttt

SEQ ID NO: 50700 - DNA, 410 bp, Glycine max
  Clone ID: LIB3167-078-P1-K1-F3
acagccgtccggcggtttaaacctggagagaatcctcttccttctttttaagctatccctctttggaaaaatttagatctggtttttcttggatctacgtaccgcttttagggcccggatctgattggatctgaaccagatttacaccccgaggggggtttgggccgggcttttattagatctgatgcatgggggctaaaatttacttgccaggggggggcgattaatttcctgtagatattcgatgggaggaacgcaattccagccgtttccgttggttcgatcgttccagacgctggattgggatatttctggatggttttataagcagcatgtcttcttccggctttagtggtggcggatttcggttgtgtgaaaataagcgtttgattggaagttttgggttggaa

SEQ ID NO: 50701 - DNA, 381 bp, Glycine max
  Clone ID: LIB3167-078-P1-K1-F4
acacactaccaatggttaaagatatttaatttactgttaacactactaatccagttttctggggagggtttaaactgctttttacatgcttttacttccccttttagggatggtggcctttgttggggactaaaacaaagactttgccataacatggggggatggccgttccaagatcctaaaccatggagggttactaactttttaattggccaaagcatttggttaaggtttccaatcaaagaaggagtttctttttgggaggatggacatgcatttaaggcttgtccctggaaactttgctggcaccgtaattgcctattattattcttcaaagggttcaacttgtggtgaattaaacttttgaattttttggaaatt

SEQ ID NO: 50702 - DNA, 408 bp, Glycine max
  Clone ID: LIB3167-078-P1-K1-F5
gaaccattccaaggcccgttgaaggtggttcttatttgaaagggttgaccaattaatttgccgggattattttttaaatggttggggttaaactcccatccattgggggaaggtccccatgggcctaataaaatttttgggttatatgttggacctaagctggggtattccaattttaaggaaaccgcttttgttgaaaaaaaaaaaaaaaaaaaaaaaataaaaaaaaaaaaatggggcggccgtttagggggttccaggttacctacccctggcttgcaacgtattagtttttttttgggggccccaaattcaaattaattggccggtgttttaaaccattaggcttggataacccttggtgttcccaatcttaatggctttgtaaaaattcccttttttcaggtt

SEQ ID NO: 50703 - DNA, 142 bp, Glycine max
  Clone ID: LIB3167-078-P1-K1-F6
tcaatcatatgtgctatttaaaaaacctttttttttttatataataataatgtaatataggggtgggtattataataggggggggggtttaaaataatatatttaataatagataatattatgttaatatatattatataaa

SEQ ID NO: 50704 - DNA, 417 bp, Glycine max
  Clone ID: LIB3167-078-P1-K1-F7
aatggccacttttgttattaagcaataagatttcgcgggtaaaactgttttaaaccagttaaatgggtgggtccgaaggacgggggcccccgtaaaaggtggaaccaacatgcgccgaaccgttaagagggctcctcaaagaattaggtatggcccggacggtccaaagaacctgggtccataataagaggagattccgtaatacttgaccggggaattccttggggtttacggatggggcattgttggccaatgagctgacccggaatccttttccagaaactgggggctggtggtggttaaaaggaattggcccttgtctgggtgcatttggcgtgacttttccggtgttcctttaaaagaatggtgttaaatttgtcggggcctatggttctaaggttttttattttatttttt

SEQ ID NO: 50705 - DNA, 232 bp, Glycine max
  Clone ID: LIB3167-078-P1-K1-F8
ccacacgcgtccgccaatggttcggtttattttttcgccaacgcgtcctaaggaaggagcggccgaacccgtaatggaactggtggtaatataaattttatagttggttactgacgctgaaccaaccgttaaactaaacttcccaaataaccatgggggattttaaacatatttccgttaaccgttttttcggcgaaggctaaatggttgatgtggggctggggaagaattg

SEQ ID NO: 50706 - DNA, 412 bp, Glycine max
  Clone ID: LIB3167-078-P1-K1-F9
cccacgcgtccgccaacgcgtccggggggattttaattcgccgattttaaaagatgagtaggtttaaaagggatgcttggggggaagccatttaaggaataatggccgtttccagggggaagaatcgcaaattgggggggaccatcgaactccaaatggggtggaaaaactccgatccacaaagggccaggcgtttaaggggttttgtaaggttgcccaacatccttggcccaaggaggaaaattggcatgctgggggatgctcaccatgttgaaaaggcggggaaaataggactggactggttggatgtggaagccctgaaaaggttaaccaaaattaagaggttggggaggaaactggctaaaagagcccatgcctttttagcttttgaagcagtcattaagcaaattcc

SEQ ID NO: 50707 - DNA, 226 bp, Glycine max
  Clone ID: LIB3167-078-P1-K1-G10
cgaccgaaattccggtggaccacacccttccgccaaccctttctcaacgcttcttttattttttaaaaaaaaaaaatatttgattgtgtaattaatttggagggggggaataaattttttttaaaataattaataaaaaataatttatttattattgataattttttatttttttaaaaaaaactgtttattttttttttaattttaaataaattcttttatattt

SEQ ID NO: 50708 - DNA, 176 bp, Glycine max
  Clone ID: LIB3167-078-P1-K1-G11
ccaacgcgtccgacaacgcggccgttcttattgggtggatgaactccccaaaaaggcaccttgtttattttccaaggggtcctttttgggaggtttagtttccaagggttaaggcttgaaaaagggtggtatggtgaatgggaaagggggccaaggatttgtttttggttcaaaag

SEQ ID NO: 50709 - DNA, 351 bp, Glycine max
  Clone ID: LIB3167-078-P1-K1-G12
tgggaggggcttggaaaagagggtttttgtttaatggtccccaagggaccgttaggtcaacaataattgcggccatggcgaatttttaaggctataattggattgatctggagtggactgttgtaaaggacaaaattaagttgaggaagttcttaattgaaacatttagcaggtttataattgtgattgaggatattgatggttaattggattaaaccggccaacgaaggaaaaaaaaggaaaaggtggaggaaaaggatcaaaggcaaaaacaccaaggaatgcaggaaagaaaggttaaaagtacccaggtaactttttttgggtttttgaatttaattgatgggtaat

SEQ ID NO: 50710 - DNA, 381 bp, Glycine max
  Clone ID: LIB3167-078-P1-K1-G4
ccacacccgtccgattggtacaaggtagggttgttgttttgttgcgtgaccaaattgaggggtggtggttaattatggggcaccgagggattaagtttttgtgcaaatagcgacgtaaaaatttgttttttgccccggggggacggccagttttaagaagaaggccataataaatttaagttccaatttaaagggacctttaaccaaaatccatgccatttcccaaaatggttttgcctttagttgaacttggggggggtttgggtaaagtttaaagccagccaagaccaaaggcggaggtaatttggaatccctgtttggtattgataaggcttttccagaagaaataatttagaaacctgttgggttttttttggaaga

SEQ ID NO: 50711 - DNA, 420 bp, Glycine max
  Clone ID: LIB3167-078-P1-K1-G5
ccaacgcgtccgggttcttttgggggctttttgattcaatcctaggggacttgtttgttgaaggggacacagggtagaaactaaaaatggggaaggggaatgaagaaccaaaaccattaaaggatttgggtttatccgagtaatgggtggaggctggcgaaaaattggttgggaaaatttcattaaggttccagccggaggcaattccttttgtttggtagggaaaggatgtgttagtgtttgccaaaactggttccggtaggattgtagttatggtttttccattaatgcatgcttatttggaagctctattctcaaatttttttttttgtttgttttgtggtttttctaattgtggaatattgtttatttaatatttttcgttaatatatatttaaactattttgggttccttttata

SEQ ID NO: 50712 - DNA, 323 bp, Glycine max
  Clone ID: LIB3167-078-P1-K1-G6
ggtttgttataaataccatttgccacatctgtgtgaaataataattaatccctgggggggtttaaccattttgttaacatttacctaagctgttgaggccacaaattttaactttttgggctggccagaaataattaggggggttttgtttttggggaaaaagaaagggtttcccttttttaaattcccgattttaatataacattaattattttttttgaaaaacattaattatgggaatagttttggttggttttggccatgggaggaaatgaaaggggttggaggatgccttaatgccttgcccataggctccatttttg

SEQ ID NO: 50713 - DNA, 326 bp, Glycine max
  Clone ID: LIB3167-078-P1-K1-G7
gaacaccagggggtggggcaataaataccattgggggggaagcctggttaatgggtttgggtaatggcattcaagtggtgtgtggttccttaattggcctatggatgtgacgattataataataataatgtgtttcttggggaggaaaaaaaatggtaaaaggtggcctaggattggggaatgttggaaaattctttcctcttgaattatgttttttaactattaatggtgtttaaaaaaaatttattattaatttaaaataagggtgggtattttatagggttctaagttttcttttgttggtttgtaagttaattatttttttt

SEQ ID NO: 50714 - DNA, 231 bp, Glycine max
  Clone ID: LIB3167-078-P1-K1-G8
ccaacccgtccgtgggtttttgggattaaatttagtcaaggggggggaaaaagaggggggggagttggaagaataagggggattgcctttttggtggaggttcctgtttggggggctgaaaggttatccttatttaatgccctcttaaaggttgcttgtgatgaatctaaaccaaaccaatttttttaaaatttgaaaataggggatacaaagttttttatatgttcttgt

SEQ ID NO: 50715 - DNA, 376 bp, Glycine max
  Clone ID: LIB3167-078-P1-K1-H1
gcccgaaattccgggttggaccacacccgtccggttattcgtggggggaatatgaagtcgtttgtttattaaaggcccccggaccatttcctgggcatggaatttaaattccggcgtaaacccatgaccttccttggatttaattccgttggcaatggaatttcaatttccctaggggcttaaatatttcccggcatttgtgcctagcctaatttttttaatagtggatatccattcccctaatttttttttattttttttccccgcccaaaccttaattccttaccctattccgttttttttaattcataatgaaagggggaaggtccaagaccgattctaagagtgccatttccaaatttgttgtgaatataaa

SEQ ID NO: 50716 - DNA, 403 bp, Glycine max
  Clone ID: LIB3167-078-P1-K1-H10
gaccattggaggcctaactaaggtgggtttattgttgagcaggctatccaaaccaggaggttgttcattttagatcaccaggactatttaattccttatttggggaaaataaatccaaatcccacaaagccttttgctccaggacccatatttttttggaaggatgatggacctttgccaccattggccatggagtaaagaaggccccatcctaagggtgaagaatatggtcctgttagcgaattttacgtccctgccagcgaaggaggggaagctattatttggttattggcaaaggctatggttgttgtaaatgatgcttgctcccatcaaataattagccattggctaaacacttatgcaattgtggggccatttgtcattccaccaattaggcaactgg

SEQ ID NO: 50717 - DNA, 368 bp, Glycine max
  Clone ID: LIB3167-078-P1-K1-H11
gaagcgtagaatgaatggcaatggttgtattttaaaaaattaaaattaaggaacgaataaaaattctttaattttggattggaaaaaaaaaaaaaaaaaaaaaaaaaaaaaaaaaaaaaaaaggggggggcggttttaaaggatcaaagttaactaacgctggcatgcaacgcaatagttttttatatggggaaccaaaattaaattaatgggccgtggtttaaaaacgtatggacgggaaaaaccttggtgtaaccaaattaaatggcttggaagaaaattcacttttttaaggtggcgttataagcaaaagggcccgaacataattgctttttcaaaatattggtaaactctaaatggaaaatggg

SEQ ID NO: 50718 - DNA, 216 bp, Glycine max
  Clone ID: LIB3167-078-P1-K1-H12
aggtaactccacaactttaatgccatttgctttgcctatcctcctctctggtggagggccgaaaccaaactggttaaaatgtgcaaattaatattgccagaaccaccatccaaaaatttccccacctttcaaattacgaattttgaacctgaggggaaatatttcttaaatggcgtttgaatttggctttaacctgtaccaaacaagaattttttg

SEQ ID NO: 50719 - DNA, 417 bp, Glycine max
  unsure at all n locations
  Clone ID: LIB3167-078-P1-K1-H2
cggaattccgggtggccccagccgtccggtctttcggtcggaacttccttggngctgtacaaggaacggaatttggccaaaggaggcatttaactaatggttgcccaacccaaaattcaagggtttccattgggcaggatagctgcttgttccagcattcgaggaaggcattgaggaggccacttttcctttttgtctgggcctaagctggggtttttccaacttggccgtcttatggcaggccaaagagtaggattcctgttgatgaaaaacggtggtttaaccaaaatcggcggatccagaaggaaaccattgcgccagaggacttcccaaatttggttggagagggtttccaggttaagagggtttcatcggatacctttttaaggggggttccagggctcatttcccgggatt

SEQ ID NO: 50720 - DNA, 230 bp, Glycine max
  Clone ID: LIB3167-078-P1-K1-H3
catgatgactgcaggtgggggttttggaggctgaaggcaaaaaggccccaccgtttaatagtttttaggatggaggagcagcaaaggcgggtcattggggagaagcttgtggggcctgcccagggctatgaagatttaattgccagccttcctgctgacaggggccgtaatgctgtttatgatttggggtttctgcctgaggggaatgtcctaaaaggcagaattttttt

SEQ ID NO: 50721 - DNA, 255 bp, Glycine max
  Clone ID: LIB3167-078-P1-K1-H4
cctaatctaatttttttttttgggccgaattttcttttaaggtttgaaaaccttaaagattttaggtggggctttggccggggttgttttggctgttaaacctcccgtttggaactaaccgatccagagtaactttaatttacaactactctgatacaccgggaagccaacggcggccaaaacttgtacggaattagtcctgggggggtttaagctttaggggttatcaattatgggggggtttacaattaaaat

SEQ ID NO: 50722 - DNA, 413 bp, Glycine max
  Clone ID: LIB3167-078-P1-K1-H5
ccccggaccggaattccagttccgaccacacccttccgcgaccccttgggatgaaagccatcacctttttattttttgccattggcacatccttgccttttaaccatatataatttccttagcagggcaacatgcattaccttttgcaaaatccgacccaactttaaccatacctgtttggtcgatttcccttacctgaatgaaaaatattcctccaaatattttgcactgtaaatataaaataaccggggttcattttattgggggtggggcaatttgccatggacctgacggagcaaaaggtgccggtgaaaggaattgtggagccagatgaagttttccaggccgtttccaaatttggaaggaagactgcattttgggtggttgaagccccccaatctaaaaccaagcct

SEQ ID NO: 50723 - DNA, 299 bp, Glycine max
  Clone ID: LIB3167-078-P1-K1-H6
ccacacgcgtccgccaacgcgtccgccaacttttcttttggcaaccatggcattggcaaccgaggcgttttttttaacccaagccttttccggtttaaaggccggggaccgggcttccgggccagggaggcaaaactccagcttttctttttccagcccgaagcccttaaggttttccagaacaatcaaagcagcagccgccgccaggaccacaaaggccccagcaaaagtgggggctgcaccggtcgggttcaccccaccagaacttgacccaaacaccctttcccggatttttgggg

SEQ ID NO: 50724 - DNA, 378 bp, Glycine max
  Clone ID: LIB3167-078-P1-K1-H7
ccacacccgtccggaggaatataagggttgttttccaatctctttggttttccaggggcagggtatttcccttaactggactgggtggggttaccaattcccctggtttggcaggtccaaggagattggaagcttttgggttggggttagtggtccttgtgttgtgggtgtttttctcgtagttatgttaacttcattctttttttttcttttatatatttttgtctcttttttattgaatcttatgtttttttaatttttgttgtattttggctaattatactcttttttttaatttattttttataatattgtttttgaatactatattatgtttattgtttattatattttatatactcttatttatttttattt

SEQ ID NO: 50725 - DNA, 74 bp, Glycine max
  Clone ID: LIB3167-078-P1-K1-H8
gtaaatcggagggttaaaaaaataatttttttacaaggagaatggtaattaatcttagggggaaatttttaaaa

SEQ ID NO: 50726 - DNA, 296 bp, Glycine max
  Clone ID: LIB3167-078-P1-K2-A10
cccacgcgtccggtgctttcccgccttcgcttcactgccaccgtcttccccgccgtctccggcagagatggcagaagaggattcaaagcctctgaactacatctccgaggtcattctcaagaagaggaagaacaccgaagcatgggctttaaggaaaaaagaacagttccagcaaaagaaataccaatccatcaagaagccggaggatttcatccacgagtatcgcaacaaggaagtggaccttataagaatgaagcggagggtgaagaggaaagtgcctgaagctaacttcaaca

SEQ ID NO: 50727 - DNA, 433 bp, Glycine max
  Clone ID: LIB3167-078-P1-K2-A11
caataaacgatgattctcattatctccctcattttttctcttctctctttctcccatgcttctgtcctagatttctgtgttgcagattatgcaggtcctattggacctgcaggatattcctgcaagaagccttcaaaggtcacagcagatgattttgcttacagtggccttggcattgctggtaacacctcaaacattatcaaagctgcagtgacccctgcatttgatgctcagtttgctggtctcaacggtcttggcatttccgcagcacgtttggacttagcagcaggtggagttataccacttcacactcatcctggagcttcagaattacttgttgtaattgaagggagcatcctagctggattcatttcttctgccaacattgtctacctcaaaactcttaagaagggggatgttatggcattccctc

SEQ ID NO: 50728 - DNA, 347 bp, Glycine max
  Clone ID: LIB3167-078-P1-K2-A12
caagccaatctgagctatcactacactcatgttcagcaactacatgctcacgtgatcgatcgtatcaatgcttaagaatctgagagaccacccaactgccacaccgaaccaaatgttctaacacgatcaaggtcttgacaccttcaggcatgtgattttgactactgaagaatcgatcgtggaccaaatcactgtgaaagtacatcatccctagatccaactctatatgcaatctgcacacagcatctagctgattctggccatgctaaaagtgctaggaggcggactattaatctactgtgacactaataacatatgatttgaacatgctgaaaaagatgagacga

SEQ ID NO: 50729 - DNA, 102 bp, Glycine max
  Clone ID: LIB3167-078-P1-K2-A4
ggggggtttttgttcttattattttttcttttttttttttttttttttctgtccttttttttttattttctttttttatattatatttttattttttttttt

SEQ ID NO: 50730 - DNA, 436 bp, Glycine max
  Clone ID: LIB3167-078-P1-K2-A5
ggaggcatagcagataacacaaacacaaccttagcctacaacaaagcaaaggaaaggaaaggaaagcatgggtttactgtggtggcgaaaggggaataaaacccaagcccaacctgaagcaaagtcgaacggcgcagactcaacgaaacccctcactgaggccccagggatgaacggcgccgtggaggttccccggccctcgaacaccaccgtctcgattttcgagtttggctccgtggccgcctccaacgacaaggtcacgctcgccggctattgccccgtctccgaagacctagagccctgccgctgggagatccttcccgccgctcagtacaacgccccccagtttcgcgtggtcttctgattctgatacccaactttttttctctcttttgccgcttgtgggaatcaaaataaactactttccttttttttt

SEQ ID NO: 50731 - DNA, 389 bp, Glycine max
  Clone ID: LIB3167-078-P1-K2-A6
cccatttccttgatatcttagttatctaatttcctttattaatcccttaattgcaagcatcatggctgaggagaagcaccaccaccacttccaccaccacaagggcgatgatgtgcctggcgaggttgattataagaaggaggagaagcaccacaagcatcttgagcaccttggggaacttggtgctgcggctgccggtgcttatgccttgcatgagaagcatgaggccaagaaagacccagagcatgctcacaggcacaaggtagaagaggagattgcggcagcagctactgttggtgctggtggttttagtcttcatgaacaccatgagaaaaagggagttatgaaagaagatgtgggagcttatggtaagaagcaccaccatccgt

SEQ ID NO: 50732 - DNA, 434 bp, Glycine max
  Clone ID: LIB3167-078-P1-K2-A7
cccacgcgtccggaaatagagaggctaagtataaatgcagaggcgctggttgagaagaccatgaaagggaacgatgcttctcatgatgctgctcatgtttggagagttcgtgatcttgctctctcccttgccaaagaggaaggcctctcttccaatccccactccatggaaattgttgagcttgctgcgcttctccatgacatagctgactacaaatacctcagggacccatctgaggaaaaaattgttgagaattttctcgatgaagagggagttcaggaggacaacaagttcaaaattttgaagatcatcaaaggaatgggtttcaaggaagaagtgtcaggaagtggaaatagtgaagggtttccagaatttggagttgtgcaagatgctgatcgacttgatgctattggtgctataggaattgcacgttg

SEQ ID NO: 50733 - DNA, 423 bp, Glycine max
  unsure at all n locations
  Clone ID: LIB3167-078-P1-K2-A8
ccacagtgccttcagctgctataaggattttctttctgtagacttcccgtttgactcatatacgcaagttttcatagagccagagatggcagtgtcatcattgagtttgggagcctctatgagtatatttagttcccaagttttgtttgatgagaaggttattgaccagactattgatacaagggttaaacttgcatatgctctcgcaagacagtggtttggtgtgtatatcactcctgaggcaccaaatgatgagtggctcttggatggacttgctggtttcttgacagatttttttattaagaaacatttgggaaacaatgaggcacggtacaggagatacaaggaaaattgtgctgtttgcaaagttgataatgatggagcaacagctttgagctgttcagcttnctgtaaagattatat

SEQ ID NO: 50734 - DNA, 231 bp, Glycine max
  Clone ID: LIB3167-078-P1-K2-A9
cccacgcgtccgcccacgcgtccgctcactctaccgcccacgcgtccgaaactaaggaggtggactcatatacacaagtttggggaaaaaccagaaatggcaaatgacatcatagagtttgggagcctctatgagtatatttagattccaagtttggtctgccgagaaagttattcaccatactatacacacacgggctaaacttgaatattctctagcaagacagaaatt

SEQ ID NO: 50735 - DNA, 263 bp, Glycine max
  Clone ID: LIB3167-078-P1-K2-B1
ggtttatcacaccgtctttgactatgggaacctcctagttggtttcgccaaagctgcctaacaagacatctaggagattatatagggcatgttttaataagcttgttagtgtgttgtaaataagctttctgtaactactatggcacaggtttacattatagatctcaagaatgtacttgtgaaactatgcaccttgatgtattgtgttgtatttgaagggaccattttcattaaatgtcatgtagaaccgtatagattattat

SEQ ID NO: 50736 - DNA, 276 bp, Glycine max
  Clone ID: LIB3167-078-P1-K2-B10
cccacgcgtccgcacagttagaggattaactccatggcatcagcagcatctgggggggtggggtcacttaatgggggggcggccaccacaaactcaagggtggtcatcttcaacacaaagaacaacgcttctaggcttgttgtaaggtcttcagatgagcctgcagcttatgctcccgccaccgtcacacccccagctgaagctgaagcttaacctaattcaccatctattttctcccaagatagattctaatgtgaatatttttatcaaggtatc

SEQ ID NO: 50737 - DNA, 307 bp, Glycine max
  Clone ID: LIB3167-078-P1-K2-B11
cccactcatccgtccactcgtccgattaattaaacttcttactcacatggatcatgcaaatattatgaccattaaagatatctagtacgtactacacataaggaaagacttcaatgatgctgtaccatgactctgagtgaatggacacagatctgcatcaaataatcagcttcaatcagcaatagactgatgaacattgtccggattatacgcatcaatagggacgagggctcaagtatgcacattcagctaatgtggtgtaccgagatctacaacctactgatctactattgaatggcaagtgtga

SEQ ID NO: 50738 - DNA, 146 bp, Glycine max
  Clone ID: LIB3167-078-P1-K2-B2
ggtatatcacaccgtctttgactatgggatcttctgtgttgttttcgccaaagctgcctaacattgcatctattagattatatagggcatgttttaataagcttgttagtgcgttgtaaataagctttctgtaactactatggcac

SEQ ID NO: 50739 - DNA, 130 bp, Glycine max
  Clone ID: LIB3167-078-P1-K2-B4
atttgactcttgaataagtgcgcagtgttttcttggttatatggtacatatacaacactgagacaagcacacgtgtgctaacattattctcaactaaaaaaaaaaatacaaatgtttcttaatttgtttc

SEQ ID NO: 50740 - DNA, 397 bp, Glycine max
  Clone ID: LIB3167-078-P1-K2-B5
attctgctggcagcttggctttacaaggcctctcagtttcagcttgtttgattggccatggaagtatgtcatactgggcactatcttgagttatatgctaataattgtgcattggatcacagacagtgatagatttggtggcacattgatgtctcaaaacattggaagaacttatatacctagaatcatttatgctattgctttgggacagttgttattattgacatttggccaattatttaagaatagcagtttagattgcaagacaattttagttgcaaaaacaatggccatattatctgcgtggagttcaactgtcattcttctttcaggaaaacaggttcccatggttgcttttgcatccatagattgaggttttttaattatgtagtttgtt

SEQ ID NO: 50741 - DNA, 426 bp, Glycine max
  Clone ID: LIB3167-078-P1-K2-B6
tggatgtgttcttctttacactgctcagggtgtagtttcatgggagcaccacaaacacgctgaaatccttggtgagtcaggctgacatcaccgccgaaaacctcaggaacgtgtcagattatcttgatgcagctcagaagatcggagtcgaagcggtttttttaccagccgatgttcagaagaacattgacgaagttcagatgaagattaattcttctgctgcagatctttccagcaagactaaaaaaaattcagagacaattaaagatgtcattgatgcaatgagacgggatctggttattcttgctgctgttatgctctttcttgcatttcttggattcttattttcaatatttgggttgcaaggtcttgtatactttttggtcattgtcgggtggattcttgttgccggcacatttatacttt

SEQ ID NO: 50742 - DNA, 329 bp, Glycine max
  Clone ID: LIB3167-078-P1-K2-B7
cccacgcgtccgcccacgcgtccgcccacgcgtccgcccacgcgtccgcacaaagagaagcattagcactaggagcagcaacaactagtctcagctgaaatggcctcttcagtgatggcatctgtggccctcaaacctgcccctttcactgttgagaagtcctcagtgagaggccttccctctctctcaaggaactcttcttcattcagagttgtggccagtggcaagaagatcaagactgacaaaccttatggaattaatggtggcatggctttgagggatggaaccggatgcatctggcaagaaaggaaagggaaagggtgtttacc

SEQ ID NO: 50743 - DNA, 354 bp, Glycine max
  Clone ID: LIB3167-078-P1-K2-B8
cccacgcgtccgcactcgtagtgaatgctgtttaagctgttgaagcagaaaaggtcagttatgacaatgtcatggatggtagcaatggaaggaggaacttgatgttcgccgcggcggcatctgctgttcgcaatcctgctgctttgactgttgagaattcctcattgcgaggccttccatatgtctcaaggaactcttcttcattcagagttgtggccagagccatgaagatcaatactgacataccttatggaattaatggtggcatggctttgagggatggaactgattcatctggcaggaaaggaaaggtaaaggatatttttccattttttatacaaatactgttgctaa

SEQ ID NO: 50744 - DNA, 399 bp, Glycine max
  Clone ID: LIB3167-078-P1-K2-B9
cccacgcgtccgcagagttagaggagaaatcatcatggcatcagcagcatctgggtttgtgttgtcacttaatgttgcagctgccaccacaaactcaagggtggtcatgttcaacacaaagaacaacgcttctaggcttgttgtaagggcttcagatgagcctgcagcggcggcacccgccaccgtcacacccccagctgaagctgaagctaaaccaaagccaccacctattggccccaagagaggtgctaaggtgaagattcttaggaaggaatcttactggtacaaaagcactggttcagtggttgctgttgatcaggaccccaacactcgctaccctgttgtggttcgattcaacaaagtcaactatgccaatgtatcaacaaacaactattcctt

SEQ ID NO: 50745 - DNA, 402 bp, Glycine max
  Clone ID: LIB3167-078-P1-K2-C10
cccacgcgtccgctcttgtgctgctctcgtttgcgtttttatcacagaggaattaacatagatatagcaagcatggcagtcacactctacgaccttagctcttcctctgggttgaagaaacttgatgagtaccttctcccacgcagttacatcaccgggtaccaagctacaaaggatgatcttactgtttatgcagctttgccaactgctccatcagatgaatatggaaatgtttccaggtggtacaagcacattgatgctttgttgataatctctggtgttactggcgagggatctggtgttattggtgagggatctcctagtgcagagcctgttgcaacttcccctgctgcagacacaaaagctgctgttgctgaggatgacgatgatgatgatgtggat

SEQ ID NO: 50746 - DNA, 407 bp, Glycine max
  Clone ID: LIB3167-078-P1-K2-C11
gccacctccggaaagcggttcactgccttgaaatcccaatcctatggcagagaaggaaacccgatgaacagctctgtagcttctctccaatcttctccaccaggtggaatcactgacgaatcaagaagaagttgagctgcgttctaaaattgaaactcttggattagaggttacaaaagttccttcaaagtcaacgcagcaccttaacgagttggaaatagctgaggagttggataaattatcagcaagattggataatcttgatgagatgatatcatcatcaatggcttcagatccacaggtgcagtcactcttgagtgatacagccgatgtgtggatgccagttatcactgctacttctgaggaaaggcgcatcttcacatgcgctactggtgacagcatccttc

SEQ ID NO: 50747 - DNA, 397 bp, Glycine max
  unsure at all n locations
  Clone ID: LIB3167-078-P1-K2-C12
cccacagggccgaaagaaaattaaaacggcgtttcgataactgccacaaaaaagtacaaatggaataagaaaaagaaaaccaacatacatcagtcactagtgtgtgaaaagcgacacaacacaacataagctttattcttttttcttcgcttcttctgtacagcacccaagattgaagatgatagaccttgcgcgcgtgcagaaggagctcgtggaatgcagcaaggacgcggagggatcgggcatcaaagtctgccccaaaagcgacaaccttgttctcttgatcggcaccattcctggccctgtcggaactccttatgaagggggcattttccagattgatatcacattgccagatgggtacccgtttgaacccnccaagatgaagtttaaaacc

SEQ ID NO: 50748 - DNA, 181 bp, Glycine max
  Clone ID: LIB3167-078-P1-K2-C3
cccacacgttcgagtgagaacaagtagagtctcctttatgaaaccacctctctgcaaaaccgacgagagtagccagcatggggcgccagcgaaccctaaaattctcattcagaaattgaccctaacctcttggtatgcatggccgaaacagcctctaaacctcgtatcacacccgtttaca

SEQ ID NO: 50749 - DNA, 437 bp, Glycine max
  Clone ID: LIB3167-078-P1-K2-C4
cccacgcgtccgaatgaattcaataagtccctcctttctctgccttataattcttgtgacccttttggctggtagcattgaaagtgcaccagcaaacgtgaagccaagccattatgctgcacccttcaataggagtgtttttccttctggttttctatttggaataggctctgcagcttaccagatagaaggagcagcagctatagatggcagaggaccaagtatatgggacacctatactaaacagcaaccagggaagatttgggatcatagtgatggaagtctagcaattgatttttatcaccggtacaagagcgacataaagatggtgaaagaagttgggttggattcatacagattttccatctcatggtccagaatattccccaagggcaagggagcagttaacaccttgggggtcaagttctacaacgatc

SEQ ID NO: 50750 - DNA, 440 bp, Glycine max
  Clone ID: LIB3167-078-P1-K2-C5
cccacgcgtccgatcgatgtttttcataggtttatttacacatcgagagtggagatatacaaggtggtatcgatcccttgttgcggaatgactatgaccttcaatcgatgtggaaaatagcagagaaagcattgatgtgtgttcagccccacggacatatgcgaccatcaatttcagaagctctaaaggagatccaagatgcaatatctattgagagacaggcagaagcattaagagaaggcaactcagatgatatgtcaaaaaattcttttcattcttccatgaacatggggtcaatggatctaggtggagctgagagttacctgtcaattgatgaatcaattgcacagcctacagcaagatagatatctttttgtaacaaaagcaaaattttctctctttcttttcttactctgattttatttttttcctctcattac

SEQ ID NO: 50751 - DNA, 197 bp, Glycine max
  unsure at all n locations
  Clone ID: LIB3167-078-P1-K2-C6
cccacgcgtccgtgtaagcaagctattacaattttattctgaactaataaccaacaagacgggaggatgtcttttcaatgaggagaggccaccaaacccnaaacccacccattatactacaccctttaatatcaatctttttccatccactcttacatatacaacaatctctttttacttaccataaataacaacca

SEQ ID NO: 50752 - DNA, 268 bp, Glycine max
  unsure at all n locations
  Clone ID: LIB3167-078-P1-K2-C7
gtccaagcagcctccaattcgtgccactnctttcaaaatggccgttaccttctcaaatctgcacacagaatcaggtctcaagtccctcgacgacttcctctctgggaaggtctacgtttctggggatcagttcacaaaggacgacatcaaagtgtatggtgctgttttggagaagccaggtgactcttttcccaatgctgccaagtggtacgaggttgtctcatcttagcttgctgcatgcttacccggcaatgctcaaggggtgaga

SEQ ID NO: 50753 - DNA, 176 bp, Glycine max
  unsure at all n locations
  Clone ID: LIB3167-078-P1-K2-C8
tcttccttccactccttcctccaatcttccctttttactcttaaatagccaacaccaaancaaaggtgggtacattttaaggtgtgaagggcctcctccacttcctctcttttaaggacttcttcttcttgtgatcattttacacttttctactctaatttgcttgttcttttttt

SEQ ID NO: 50754 - DNA, 375 bp, Glycine max
  Clone ID: LIB3167-078-P1-K2-C9
cagaaacgaacaactataaactggatgacgtgtctgagattatatggaccatatatccaggggacttcatgttagaatctgggatttaactaggagataatatgcaaagaagctctgctattattttaaatactttcgctgaacttgagagtgatgtattgaatggtctcacctctatgttcccttctttttaccccattggcccttttccttatttttaaaccaaagtccacagaaccacttggcttctttaggttccaatctttggaaggaagatactgattatcttgaatggcttagagccaaggtaccataatctgttgtttatgttaaactttggttgtatttaagtttttttttcatatctactttttg

SEQ ID NO: 50755 - DNA, 237 bp, Glycine max
  Clone ID: LIB3167-078-P1-K2-D1
ccgaatcgtcgaccacgcgtcgagcagagcaatagctctcttgttaatctggacccttggctggtgcataaaggcaccagcaaactaaccaagccattatgctgcaccctataggagtgtttcttggttcattggaatagttgagtacatgaaggcagacttgagcgagccaagtttggacaccttctaacagaccggagatgggacataggaggagcagcatgatttatacgtcag

SEQ ID NO: 50756 - DNA, 365 bp, Glycine max
  Clone ID: LIB3167-078-P1-K2-D10
gagtattcaactatgtgaatcaactgtgtgtgagcctgccaagtccatctggagagtcagtgataagctgtaatagtctttgcaagatgccaaacattacgttcacaattggaaataaaccttttgtcctcacaccagagcagtatattctaagaactggagaaggcattacagaagtctgccttagtgggtttattgcttttgatgttcctcctccaaagggtccattgtggattcttggcgatgttttcatgagggcatatcacaccgtctttgactatggaaatctccaagttggctttgccgaagcagtctaattacgctttctggaggattttatttggaaatttgttaagcgtgttgtt

SEQ ID NO: 50757 - DNA, 296 bp, Glycine max
  Clone ID: LIB3167-078-P1-K2-D11
gtaactactgcgcaaattagggtgctttcattctggacctaagagatcaccaacgtgcctggttgtcctcaggttcccttagtaaacttacggttttttgcttgtcgaggatggggcggggtcaagccctgggaggatgtgctcatactccacatggctacatgctctcgttcaaggatcaattccatgcttgtcctcggcaggatgcagcacattattagcactggaaatgcgagtattacagaaattcgtgactactcaaagactaccagttcactcttgcatattactcgtgg

SEQ ID NO: 50758 - DNA, 364 bp, Glycine max
  Clone ID: LIB3167-078-P1-K2-D2
gaagattccgtttctcattcacaatggcaatctcattagtgaatccctcattgctgtccagtacattgcggtggtttggaatgacagaaatcccttgttgccttctgacccttaccagagagctcaggctagattctgggctgattatgttgataagaagggtgtctgatcttggaaggaagatttggacatcaaaaggagaagaaaaagaagcttccaataaggagctcatagaaacccttaaatcgctggaggaacagctgggagacaagacttactttggaggagacaatctaagttttgtggatatagagcttcgttcattctacatttggtttaaagactatgacactttcggtaccct

SEQ ID NO: 50759 - DNA, 138 bp, Glycine max
  Clone ID: LIB3167-078-P1-K2-D3
cccacgcgtccgcccacgcgtccgtccacgcttccgtgctatttgcgagttgcaatgagtaacgaagaggctcctttatcagcgtcgggcgagtagctacgagttgagcaaaggcatcaatgggcctcgacaaggtta

SEQ ID NO: 50760 - DNA, 407 bp, Glycine max
  unsure at all n locations
  Clone ID: LIB3167-078-P1-K2-D4
cccacgcgtccgctggcacccaatttattcataattttcctgagcgaacttataaatcaatgcttattccacttctgcaagaagataatagagctggcgaaacaactcgcaaagggttttatttgtatgatgataaacgcaaggctagtcctgatcctgaattgaagaactatattgagaaggctaggagcatttctggtgtctccgttgatccaaagcttgccaaattacaagaaaaggatatcatagagatgatattctttcctgtggtgaatgaggcttgtcgggtccttgatgaaggtatcgcagtcaaagcatcanatcttgatatttctgctatcatgggcatgggttttcccccttacaggggaggcatcatattctgggctgattcttttggatccaag

SEQ ID NO: 50761 - DNA, 271 bp, Glycine max
  Clone ID: LIB3167-078-P1-K2-D5
cccacgcgtccgacaatctagggttttagaatttacccaaaaccctcttccatggcagaagaagcagcactggaagtcgttgatcccaacaccgccgctgccgccgccgccgtggacatggacgtcgagaatgtcgaggccggcggcaacggcgccgagccgaaccagaagcgcgccagggaggaagaggagccccagggcggcgacgacgactttttgaagatgcagcgggtggacgaggaaaacgtaatgtccggctaggaacaaccct

SEQ ID NO: 50762 - DNA, 95 bp, Glycine max
  Clone ID: LIB3167-078-P1-K2-D6
catatatcactcacaaatgaatgtttgtttcaattaaccattgatatgcactccctctcaaaccatatctccctatgtttcattttcatcattat

SEQ ID NO: 50763 - DNA, 447 bp, Glycine max
  Clone ID: LIB3167-078-P1-K2-D7
accatgcttcagcttacgaagactattatttttctacacctcaccaagaccttcacgctcctggaccttcccatgattaccagtgctgctccaccttcccaagattaccatccttcacctgctagatcagaaagttgttatcccgagccctacaaccatcagcaatactcaccagagaattcacagcatttaggtcctaattacccttctcatgaaacttcctatttttcttatccccattttcagtcttatccaagttttacagaaagcagccttccctcagtcccatccaattatacttattatcaagggtcagatgcttcatattcttcccagtcggctccgctaactacaaaccattcattaagtgctcaacacagttcatgcagcagaaatggaactgtcgtggaacctaagccaactactcagacataccagtatgacagg

SEQ ID NO: 50764 - DNA, 235 bp, Glycine max
  Clone ID: LIB3167-078-P1-K2-D8
ctcacctcagtgctggtgatcttcttcgagtagtatataaatctggttctgaaaatggcagaatgattcagaatatgattagggaaggaaaaattgttccctctgaggtaacaattaagctcttacaaaaagcaattcaggaaagtggcttctgacaattttcttattgattgttttacttcactttcatttatatcctttctgtctctttttttataatatccgtttttttttt

SEQ ID NO: 50765 - DNA, 430 bp, Glycine max
  Clone ID: LIB3167-078-P1-K2-D9
ccaacaacaagtacgaaccaatactaataattatattattattattctcacgggtaaataaataaataaaatggtgcgtgcatagtaataggctaatagggtagtagtttcttcatgttgggtagttggaactccttaagcagcttcagagtctgagaagtgagaagcggaagaagaagcgatgcgtttttgcccgtgttttggatccgaggaggccaagggggtggcggatcgcgacccggtcctgctggtttcgggcatgggcggcttcattgtcaattccaagcccaagaaattcgggttcaccactcgggtttgggtcagactccttctcgctgacgtcgagttccgaaacaagatttggtccctttacaatccccaaacaggtttcactgaaacgttggacaagaagtctgaaattgtggtccct

SEQ ID NO: 50766 - DNA, 328 bp, Glycine max
  Clone ID: LIB3167-078-P1-K2-E1
cccacgcgttcgaacaaacgtccacaacaacacatttcgccgtttcaaattactacttgacaccgtgtgaagtcctaattcactaggacgttagaccagagatagaagaagggagagtggaaaatttcggaggcaagagggacggcgcggacgctttctagcgatagttttaagtgtcgcttcgcaaatcgccacaaaaaaacacgcgtgacgggagaggtgctcatatttagtgtccatcgtgtcttgaaaaggattgcttccaaaggaagagagtcttgcggtgtttcggagctattgacttcatagggtgatgtgcaaatggcac

SEQ ID NO: 50767 - DNA, 228 bp, Glycine max
  Clone ID: LIB3167-078-P1-K2-E10
atcacattgcaaagaaaatacacattacattactaagtctttgttcatttgagtagtagtgatggctagcctcaaggttgcatgtgtggttgctgtgatgtgcatggttgtggtggccatgagtgctgcacccatggcacatgccgcaatcacgtgcgggcaggtcgtcggcgacatgtctccgtgcttcagttatcttcgaagcggctgaaaaccgtcgcaggcctt

SEQ ID NO: 50768 - DNA, 308 bp, Glycine max
  Clone ID: LIB3167-078-P1-K2-E11
cccacgcgtccgagaagagccatggtgcacgtttccttctaccgaaactatgggaggaccttcaagaagcctcgtcgggcgtacgagaaggagcgtttggacgccgagttgaagctggtcggtgagtacggacttcgctgcaagagggagttgtggagggttcatttcgctttcagccggatccggaacaacgccagatatcttttgtccctagactgtgaagaacctgcgccgtatcttttagggtaggagctttcttttgtataatgtacctttttctggtcctttaattttgggggggggggggg

SEQ ID NO: 50769 - DNA, 375 bp, Glycine max
  Clone ID: LIB3167-078-P1-K2-E12
agatttgaaccttgccaaaaaaaaaaaaaaaaaaaaaaaattaaatttaaaaaaaaaaaaaaaaaaaaaaaaaaaaagaaaaaaaaaaaaaaaaaaaaaaaaaaaaaaaaaaaaaaaaaaaaaaaaaaaaaaaaaaaaaaaaaaaaaaaaaaaaaaagggggggccccttttaaagaaacaaattttatttacccttcgttgcaactaaaaaatttttttaatgggccacaaaaataaaattaattggccgggttttaaaaacttgtgaactggaaaaaccctgggttaaccaaataaaattttttttaaaaaaaatgcgggttgggcagggggggaaaataaaaaaaaggccccaacaaatccccctttcaaaa

SEQ ID NO: 50770 - DNA, 98 bp, Glycine max
  Clone ID: LIB3167-078-P1-K2-E2
tcgatccgtgaccacgcgtcgccacctcggaacaggtgagactaaatgagacaaatgcttctaagatcgttccagtgaccactgcaaccgccgtccgc

SEQ ID NO: 50771 - DNA, 440 bp, Glycine max
  Clone ID: LIB3167-078-P1-K2-E3
cccacgcgtccgtttcgaaagattttatccattagtatattttaaaaatgactgggataaacgtaagatttcaattattgaaagtgagtaagtaaacaatttaattggattggtcgaatggtatcaaaaaaatggagcactaactgccattacttttttattattgaattaactcgttcaactttgtttttttttttatcatatcttattttttttcatttaatatttttctatttttatttatacatatttcttcttattatattcttatcaatttttattatttactttttattttttttttatttttattttatatatattatatacattttatttatcattcatatttatctattttccatgttataaatttatttatattatttttgttcatctaatttttatttgcgttatatgttttatactatctctatttc

SEQ ID NO: 50772 - DNA, 447 bp, Glycine max
  Clone ID: LIB3167-078-P1-K2-E4
aaacattcttgtggggtaggtactctatggtatatgttctctgtcattgacaaggactgggggttcgctgatcaagcattaggtagagatcttgtaaagagaggagttcctgttaaggacccatctgctccccatggagttcgtcttttgattgaggactatccttatgcttctgatgggctagagatatgggatgccatcaagtcctgggtgcatgaatatgttttattctactacaagtcagattagtaactctaaaatgactcttaacctcaatcttggttttaagtacttggggagggggggggggggggtgttttaagatttattctttttttttcatttttttttttatttttattttgttttataatttttgatatttttcttatatttttacttttttattttcatttactatatttcttaattttatttttatttttt

SEQ ID NO: 50773 - DNA, 357 bp, Glycine max
  Clone ID: LIB3167-078-P1-K2-E5
caacttttctgtcaaccggcccaatctagcattagcccagcatggccaccgcaacagcaggagccacctcgtccttcatggggacgcgcctcctggaggcccattccggagcggggcgggtgcaggcccggttcgggtttggcaagaagaaagccgtcggcgcgaagaaagaccccagggggtcaggcaatacccacgaagggcagcctaagatgcggagaagacgaagaggacaagggtaactgaatcgccgcttctgcagcttcgttctttcgtttttgtttcatctttttagcgtcagagggggaataaaaaatggaggttttggtggttcccgctttcaccattgacgttccc

SEQ ID NO: 50774 - DNA, 419 bp, Glycine max
  Clone ID: LIB3167-078-P1-K2-E6
gatccgtcgtcttcaagaattcccaccaaatagcactcttgatcccacactctatggtgatcaaaccagtaccataacaaaagaacaattggagattaacatgggaggggtcacagtagaagaggcacttagtactcagagattattcatattagattaccaagatgcattcatcccatatttgacgaggataaacagcctacctactgcaaaagcttatgccacaaggacaatcctgttcttgaaagatgatggtactttgaagccacttgctattgaattaagcaaaccacatccagatggagataatttgggtcctgagagtatagtggtgttgcctgcaactgaaggtgttgatagtacaatttggctattggccaaagctcatgttattgtgaatgactctggttatcatcagc

SEQ ID NO: 50775 - DNA, 424 bp, Glycine max
  Clone ID: LIB3167-078-P1-K2-E7
gctcttgtctctcacggttgactctgcggttcttaatctctccgacatctccgatctctcgcatgtccctgatcacatcctgctcgacctcttcctgagaatattgaaggctgggaagctgactgagaaagttctgagactttttatagcaactggtaaggatgaagtcctctcatttgttcaggcactcaatatccaacatattttgacccctgtgcttcccaccaggtgttctggggcaaaatcagacttttagtttgtaagatagtctgtaccttgcaagatgtctcaagcagttatcaacgataatgaagtggacattgttattggtgcacttgcattctgatcttacaacttttatgaattaatggaggccaattttcttccgctttcacctgataatagtaaaagatcctgaccttaa

SEQ ID NO: 50776 - DNA, 422 bp, Glycine max
  Clone ID: LIB3167-078-P1-K2-E8
gctatggtctgcccctgttgctaagtactttttcaggaacgaagatgggtctcattgctgctctcaacctatgaaccaggacaaaatctatggaaagctggtactattgaaagatgcagtccttgagggggtattccatttaacaaagcatatggaatgacagcctttgaataccatggaacggatccaaggtttaacaaggttttcaacaaggggatggctgatcactctaccattacaatgaagaaaattcttgagacctacacaggctttgagggacttaaatccctggttgatgttggtggaggaactcgagctttattcaacatgattgtcttaaagttttccattattaaggcatttatcttgatttgccccatgtattggagtatcctctatttttatccggttttgaacatgtt

SEQ ID NO: 50777 - DNA, 439 bp, Glycine max
  Clone ID: LIB3167-078-P1-K2-E9
cccacgcgtccgcccacgcgtccggtcctaatgagttgttttactcctgaaaaacccaccatgtctactctccaaatggttcctcttggcaagcttcgttaccaaaggctaaggcatgaaaaagggtgggatggtgaaagggaaaggaggccaaggagctggtttaggttcagaagggttcccattaggagaaggctcagactcaaaatttcaagcttgagaagactttggaggaaaagggctaggctggtttcttccatgagaatttcatatgccaaagtgttgaaaagattcaaggaaggtcaagtccattttggtgacctttttgctgggaactacttgttcatgcatgtcaaccctgcctcactcaagtgccttgaaagggatttgtccctctcaaaaattgcatagagcctttattgggttggtaatttggtat

SEQ ID NO: 50778 - DNA, 315 bp, Glycine max
  unsure at all n locations
  Clone ID: LIB3167-078-P1-K2-F1
aagatcggaatcaacgtanttggaagaattggccgtttggtggccaggttttctctacagagagacgatgttnaacttcttgccaataactatcctttcattaccaccaattacatgacatacattctttaattctacagttttttactttttttttattcttcaatattttaattattatgattttattattaatatatttttttatatatatatatctaatttatatttttcttattcttatttacattaatatattatactatatttactttaaatttattttattaatatatatataccttatcttattat

SEQ ID NO: 50779 - DNA, 414 bp, Glycine max
  Clone ID: LIB3167-078-P1-K2-F11
aagttcttcatgcacccagtcctgttccatatttcagtcaagtttggttgacttatttgatatttgaagctttgggtttttaatagatatatctagtttaatgaatggatttgtaagttgagtatgttataagtttctccgttaggtccccttggaagccagacttttttatgcaattggcggatggtattggaactttgtaggttctgattggtttgatttttttccttttattcgattttcttgttgtggccaagaattaggtgcctcgagttaggagaacgatagtctagtatcttttctcccagagggatttttgagtcagtttctgtttatatttaatatatgcttaattggtttttatgtttgcatttaactcaaaaatcaaaatggtttttgttggttgagggtgtt

SEQ ID NO: 50780 - DNA, 393 bp, Glycine max
  Clone ID: LIB3167-078-P1-K2-F12
cccacgcgtccgggcaattagtgctcacagattattcatattagattaccatgatgcattcttcccgtatttgacgaagataaacagcctacctattgcaaaagcttatgccacaaggacaatcctgttcttgaaagacgatggatctttaaagccacttgctatcgaattaagcaagcctgcaacagtgagtaaagtggtgttgcctgcaacagaaggtgttgagatataatttggttgttggccaaggctcatgtcattgtgaatgactctggttatcatcagctcataagccattggttaaatactcatgcagtgatggagccatttgccatagcaacaaacaggcatctcagtgtgcttcaccccatttataaacttctttatcctcac

SEQ ID NO: 50781 - DNA, 420 bp, Glycine max
  Clone ID: LIB3167-078-P1-K2-F3
gcggcttcaaccttgtagttattctctttcttcttttttagctatccctctcttgaaaaatctagatctcgttcttccttgatctacgttacgcttttagtgaccggatctgtatggatctgaaccagatctacacgccgatggtggttttggcctggtctttcatagatctgatgcatggaggctcagatctactgtacagaggtgtgcgattcatatactgtagataatcgatgagaagaacgcagatccagccgcttccgcttgttcgatcgctacagacgcttgtatcggattattcatgattgattcataagcagcatgtcttcctccggctttagttggtgcagatctcggatgttgtaaaattagtgtatgatgtgaagctatgggctggaaaatgtggatgtaggagatttc

SEQ ID NO: 50782 - DNA, 239 bp, Glycine max
  Clone ID: LIB3167-078-P1-K2-F5
ggtaacattcccaggcccgctgtaggtggtgctaatttgaaatggctgcacaattcattttccagggttatattttaaatggctagagataaactcccatacatttggggaatgtacgcattggcctaataaaattttttggatatatgtttgaactaagcttgagttatacaattttcaggaaaacgcttctggtgaaaaaaaaataattatgaatataataaaaatttaattatggt

SEQ ID NO: 50783 - DNA, 387 bp, Glycine max
  Clone ID: LIB3167-078-P1-K2-F7
atggccaccttgctattcagcaatcagcattcgcaggtcaaactgctctgaagcactggaatgagttggtccgcagaccgggccccgcaaaggtcgaccaacatgcgccgaccgcaagagtgctcctcatagcatttggtatggcctgatcgtccaagtacctgggtccattcaagagcgattcgcatacctgaccggagaatccagggactacgagggcactgtggactatagctgcccggaacctttcagaacctgagctccaggtgttcacagggatgggcctgctgggcacttagctgcccttttcagaggttcctgacaagaatggcggtataatttggcgagggccgttaggtccaaggctgttcattattttcttttttt

SEQ ID NO: 50784 - DNA, 384 bp, Glycine max
  Clone ID: LIB3167-078-P1-K2-F8
cccacgcgtccggccactcgttcgtccactctttcgtccacgcgttcgaaagaaagagccagcgtaaccgtaatcgcactggtagtaatatcaattctatagtttgttactgacgctgcacccaccgctaaactaaacttccccaatcaccatgggagattctaaacatatttccgttcaccgtcttctcggcgaaggcttaattgctgatgtggtgctgtggaagaattggcgcggagcggttgcggtgcttgtatctgccaccgcattgtggtacctcttctagcgagccggttacaatttcttgggcttcgtcgccaatgtagtgttgctttttggtgttattctctttttctgggccaaagctgctaacctttttaatag

SEQ ID NO: 50785 - DNA, 434 bp, Glycine max
  Clone ID: LIB3167-078-P1-K2-F9
cccacgcgtccgcccacgcgtccggcgagatcttcattcgccgattttaaaagatgagtaagcttcagagtgatgctttgcgtgaagccatttcaggaatcatggccgattccaaggagaagaatcgcaaatttgtggagaccatcgaactccaaatcgggttgaaaaactacgatccacagaaggacaagcgtttcagtggctctgtcaagctgccccacatccctcgccccaagatgaaaatttgcatgcttggtgatgctcagcatgttgaagaggcggagaagataggactggactggatggatgtggaagccctgaagaagctaaacaaaaataagaagttggtgaagaaactagctaaaaagtaccatgcctttttagcttctgaagcagtcattaaacagattccctgtcttttgggtcctggtctc

SEQ ID NO: 50786 - DNA, 429 bp, Glycine max
  Clone ID: LIB3167-078-P1-K2-G10
cccacgcgtccgcccacgcgtccgttaaaattataaaaaaaaaaaaaaaaaaaaaaaaaaaagaaaaaaaaaaaaaaaggaaaaggaaaaaaaaaaaaaaaaaaaaaaaaaaaaaaaaaaaaaaaaaaaaaaaaaaaaaaaaaaaaaaaaaaaaaaaaaaaaaaaaaaagggggggtccctttaaaagaaaaaaaattaaagtacgggtaaatggaaaataaatatttttaaaaaggtgaacaaaaataaaataaacggccctttttttaaaaaatggaaacgggaaaaaaacttgttttcgcgaaaggagagggggggggaaaaaaaattccttttttaaaaataagggtaaaataaaaaaaaatcccaaaattatatttttttttaaaaaaatttcgaaatcaataatggcaaaatggaaccccccc

SEQ ID NO: 50787 - DNA, 277 bp, Glycine max
  Clone ID: LIB3167-078-P1-K2-G11
cccacgcgtccgcccacgcttcctgtcctatttagtcgaaggactgctcaaaaacgcaccatgtctactctacaagggggtcctcttgacacgcttcgctaccaaaggctacggcatgaaaaagggtgggatggtgaacgggaaaggaggccaaggagctggtttaggatcaaaaaggttccgattaggagaaggctcacactcaaaatttgaagctcgaagagactttataggaaaagggctgaggctggttatcaaatgtgaaattcatatgcca

SEQ ID NO: 50788 - DNA, 439 bp, Glycine max
  Clone ID: LIB3167-078-P1-K2-G12
ttggaagggcatggaagagagggtatctgctttatggtcccccagggaccggtaagtccacgatgattgcggccatggcgaatttcttaggctatgatttgtatgatcttgagttgactgctgtgaaggacaacactgagttgaggaagctcctcattgagacatctagcaagtctataattgtgattgaggatattgattgttcacttgatttaaccggtcaacgaaggaagaaaaaggaagaggtggaggagaaggatcaaaggcaaaaacaacaaggaatgcaagaaagagaggttaagagtagccaggtaactctttctggtcttttgaatttcattgatgggttatggtctgcttgtggaggagaaagactaatagttttcaccacaaactatgtggagaaattggaccctgcattggttaggaaagggagaat

SEQ ID NO: 50789 - DNA, 428 bp, Glycine max
  unsure at all n locations
  Clone ID: LIB3167-078-P1-K2-G3
cgacagcgttctgagtcttttcttcttcgttaccctcttcacatgccttctctctgctaattccgacgatgaccatattttcctaccgagtcaactccatgacgatgactcagtgagttgcactgctaccgacccaaaccttaactacaagccggtgatcggaatcctgacccaccccggcgacggtgcctctggccggctcagcaacgccaccggggtttcttacatcgccgcctcctacgttaaattcgtggagtccggtggtgctagagttattccnccttatctacaatgagtcacctgagaaccttaacaagaagctcgatttggtcaatggagtgctcttcactggtgggtgggctgtttctggtccatatttggatactcttggaaaccattttaagaaagctttagagaaaaatgatgct

SEQ ID NO: 50790 - DNA, 412 bp, Glycine max
  Clone ID: LIB3167-078-P1-K2-G4
cccacgcgtccgatttgtacgaggtagtggtgctgttctgttgcgtgaacaaattgaggtgtgcgtgttcattattgggcaccgatggattcagtttctgtgcaaatagcgacgtcaaaatttgttctttgccccgcggcgacggccagttctaagaagaatgccatcatcaatttcagttccaatttcaaaggaactcttaccaaaatccatgccattttcccaaatggctctttctctagctgcactttggcgtgtgtctggtgtcaagttaaagacagacaataacaaattctgaagtggggggggggtggcgtggttttttatgataatggctatttctgtataatatattgatgaaaccttgttggtgtattttttttaagttttaaagtttattttttaccaattt

SEQ ID NO: 50791 - DNA, 421 bp, Glycine max
  Clone ID: LIB3167-078-P1-K2-G5
cccacgcgtccgggctcctctgcgtgctcgttgaattcatcctaagtgacttgcttgctgaaggcgacacgaggtagaaacgaagaatgggggaagagaatgaagaaacaaaaacatttaaggatttgggcttatccgagtcattggtggaagcttgcgaaaaattgggttggaaaaatccattaaagatacagacagatgcaattcctcttgcattggaaggaaatgatgtgataggacttgcccatactggttccgtgtagactggaacttttgctctttcattttgtattgggggggggggggggggggggggatatttattttttttgtttttttatattatatccttttaattttattgtttatttttattttgtattattatttatcttagtttttagtgttcttttttattgtt

SEQ ID NO: 50792 - DNA, 374 bp, Glycine max
  unsure at all n locations
  Clone ID: LIB3167-078-P1-K2-G6
cccggtcgaccacgcgtccgggtctgtttaaattacatctgccacatctgttgtcatccattatagatacctccaggattgtcaagatttttttaacatatgcctaagctcctaaggacacanattatcactttctgagctggacagaaatcattagagcggatttgtgtagcgtgcaaaataatatctttttcatgtctattaatgttactatacagtattcatttttcacttgatttaaccgctcttctgtttttagatattatttatattgtgtttcataatgtattttatgtcttattctatcatctttatccattttgggggggggggggggggggggggggttaatcttttttcttctttttttatta

SEQ ID NO: 50793 - DNA, 360 bp, Glycine max
  unsure at all n locations
  Clone ID: LIB3167-078-P1-K2-G7
cgtcggaacaacaagtgttgcgcaatagataccattgtgtgagcctgtttatggtgtggtattcattaagagagggggaaccaananncactatttctcatctttcttacataattttttttcattttttttttaatttatttttttttatttttttaatattctttttttttttattttttattttattttttataatttttctttatttttttttatttattttttttcaatttttttatttttattattttaccgggtggttggtaatacttttattatttttttttaatctataatttataattttttttcctttatatatattaatttttttatttatttttctttttattatta

SEQ ID NO: 50794 - DNA, 343 bp, Glycine max
  unsure at all n locations
  Clone ID: LIB3167-078-P1-K2-G8
cccacgcgtccgttggttttttggagtaattttagttcagtgtgtggaagaagaagagtgggagttgttagtattagggtgggtgattntttggttgaggttnnatttttgttgttgttttttttatttttttggttttttggtttttttagtttttttttattttttttatttttttgttttttttttttttttttttttttttttttttttttttttatttttttttttttttttattttttgttgtgttttatttttttttttttttttttttttttttttttttttttttttttttttttttttttattttttatttttttttttttttttattttttt

SEQ ID NO: 50795 - DNA, 438 bp, Glycine max
  Clone ID: LIB3167-078-P1-K2-H1
gtttatcgtgaggagaatacggagtcgtacgctctttataagcgcacggatcaatgacatggcaagtgaatttaaattcccgcctaaacccctgaccttcccttgatttcatttcgtttgcaattgaatttcaatttccctaggggcttaatatctccccgcatttgtgcctagcctcattattatcatagtagatattcattccccttatctttctctcttctctctccccgcccaaaccctaactccctaccctattccgctttctctcatccatcatgaaaggaggaaagtccaagaccgaatctaagagagccgatgccaaacttgctgtgaataagaagggcgccgccaccaatactaggaaacccgccctgaaggggaaggcagcgaaagatcctaacaagccaaagaggcctccaagtgctttctttgttt

SEQ ID NO: 50796 - DNA, 421 bp, Glycine max
  Clone ID: LIB3167-078-P1-K2-H10
gaacatttggagcctaacttaggtgttctcactgttgagcaggctatccaaaacaagaagttgttcatcttagatcaccatgactatctcattccttatttgaggaaaataaatgcaaataccacaaagacttatgctacaagaaccatatttttcttgaaagatgatggaactttgacaccattggccattgagttaagtaagccacatcctcagggtgaagaatatggtcctgttagcgaagtctacgtccctgccagcgaaggagtggaagcttatatttggttactggcaaaggcttatgttgttgtgaatgatgcatgctaccatcaaatcattagccattggctaagcactcatgcaattgttgagccatttgtcatagcaacaaacaagcaactgagtgtggttcaccctattt

SEQ ID NO: 50797 - DNA, 82 bp, Glycine max
  Clone ID: LIB3167-078-P1-K2-H11
gaagcgtagtatgcatggtcattgttgtaatataatatatttatattcatgtaccaataaaaattcctttatttttgatatc

SEQ ID NO: 50798 - DNA, 427 bp, Glycine max
  Clone ID: LIB3167-078-P1-K2-H12
aggtcactcccaactttcatgccatctgcatttcctatcctcctctctggttgaagtcccggaacaatcttgataaaatcttgaaattaatagtgccagaaacaccagtcaataatttccccaacttcgaaatcacgaattttgaaactgaagagaaaatattctcaaattgcgtttgaatatggctataagctgcaacaaacaagaattcttgctacgacccgtttttcacgctagagaatccaccacagcgtttctacctccactaagcctctcacttaaactcccaccgcaatcacattcaaaagtcaggagggtttgtaaaatgtctgcaactgaagtcacaagctctaagatatcatacgagtcctttgcaataaagcctcctgagcacccaacttatgatttgaagggcattatcaagcta

SEQ ID NO: 50799 - DNA, 557 bp, Glycine max
  unsure at all n locations
  Clone ID: LIB3167-078-P1-K2-H2
tgtctnntttcgttcgaacccttcccttgggtgcnntgtacataggtaacnttngtatttnntgtcaaagggaagggcaattatacttcaatgttgatgcacctnaaaccatnaaaatnncaaaggattaccaaattgtgcnnaggatangnncttgcattgttacagcnnattcggaggaaaagcnnattgaggaanggacacnnttttcctttcttggtcttggtctttcaagctggtggtnnttttccaaacttttgnntcgtcttattggcaaaggacaaagaagtaaaggaatcnncgtatgnnatgaaaannacggttgctttcatacanataatcggcgtgataccagaatagataaacatatgtcgccagaggggacttcccaaaatttttgttaagagaaagggttttcaaagttaaaaggtagtatcaatttcagatatactatataaaaagaggtggatttcagggcttcaatatacncggagatttntgtaagtttggtcaaggttgatttgcccaaagggatggttcagcagggttactttttc

SEQ ID NO: 50800 - DNA, 431 bp, Glycine max
  Clone ID: LIB3167-078-P1-K2-H3
cccacgcgtccgctcattctccctttcctctccgaaccctcgatcactctcacgcgctcctatattcgctcctccaccgtcgctctctcgaacaaccacaacaccatcttcatcacatggcaaacgcagcatctggtatggcagtccatgatgactgcaagttgaggtttttggagctgaaggcaaaaaggacacaccgtttcatagtttttaagattgaggagcagcagaagcaggtcattgtggagaagcttggtgagcctgcccagggctatgaagatttcactgccagccttcctgctgacgagtgccgatatgctgtttatgattttgagtatctgactgaagggaatgtccctaaaagcagaattttttttaatgcggggtcccctgacacatcaagggtgaggggcaagatgatttatgcaagc

SEQ ID NO: 50801 - DNA, 268 bp, Glycine max
  Clone ID: LIB3167-078-P1-K2-H4
cctaatcttatttcttttcttgcgccgaaacattctttcaagtctgaaaaccttcaagatattatgtcgcgctcttgccgtcgctggtctcgctgttgatcctcccgttttgaactcaccgatccaagttcactttcatctacaactactctgatacaccgtgaagccaacggcggccaagacttgtacggcattagtccttgtggcgtttcagctttaggagttatcaattatgggtgagttgacaattcagattagcaacgtcctt

SEQ ID NO: 50802 - DNA, 392 bp, Glycine max
  Clone ID: LIB3167-078-P1-K2-H5
cggacgcgtgggatgaaatgcatcaacttgtcattttttgacattgcgacatgcatgccatgtaaacatatatcatttccctagcaaggcgacatgcattagcatatgcaaaatccgcaccaactctaaccataactgttttgtcgatttcctctaactgaatgaaaaattatactccaaattatttgcactgttaatatcaaaataacggtgttcatatttataggtgttgagccatttgacattgatctgaaggagcagaaggtgacagtgaaaggaaatgtggagccatatgaagttctgcaagccggtgccaaatcttgtaagaagacttcattctgggtggatgaagctccacaatctaaaaaccagccttttgaaagtgcacctgt

SEQ ID NO: 50803 - DNA, 381 bp, Glycine max
  Clone ID: LIB3167-078-P1-K2-H6
acgacgtacgcccacgcgttcgcccacgcgtccgcccacgcttcctttagcaaccatggcaatggcaacccaagccggtctcttaaccccacccctgtccggtctcaaagccagcgaccgcgcctccgtgccatggaagcaaaactccagcctctccttctccagcccgaagcccctcaagttctccagaacaatcagagcagcagccgccgacgagaccacagaggcaccagcaaaagtagaggctgcaccggtcgggttcaccccaccagaacttgacccaaacaccccttccccgatcttcgggggcagcaccggcgggctcctgcgcaaggcacaagtggaggagttttatgtcattacgtgggactcacccaaaga

SEQ ID NO: 50804 - DNA, 119 bp, Glycine max
  Clone ID: LIB3167-078-P1-K2-H7
gcccaccgtccggatgaatatcatggctgcctccaatcttttgtttccagagtctatgtatatcccctacttgactgggtggtacaattccctctttcgcaagtcaaggagaaggaagc

SEQ ID NO: 50805 - DNA, 134 bp, Glycine max
  Clone ID: LIB3167-078-P1-K2-H8
actaatcatatcgttatataacttatttttataccatgagaatcgctatcaaccacaaggggaacatttttaaaacatgcggcaactacgacttctctgacatgactagctctaccaagggaaacagctatggt

SEQ ID NO: 50806 - DNA, 64 bp, Glycine max
  Clone ID: LIB3167-078-P1-K2-H9
catcattccctttgtttctgttgctttcttgtttgttcttcttcttcttgttgatcgacggggt

SEQ ID NO: 50807 - DNA, 454 bp, Glycine max
  unsure at all n locations
  Clone ID: LIB3167-082-P1-K2-A2
agaacttgtagaggtgggtcatggtgatttgtttgtttagccacggnggcaaaagatgcaaactcgtgaagagttggttgaagcttccgctaccctcatatggattgcttcagctcttcatgctgctgttaactttggacagtatccatatggaggtttaatcctgaataggccaactattagcaggagattcatgcctgagaaagggtcttctggattatgatgcgttagctaagaaccctgagaaggagtttttgaagactattactggcaagaaagagaccctcattgaccttacaattatagaaattttatcaaggcacgcatctgatgagttctaccttgggcagagagatggcggtgactactggacttctgatgccgggccattagaggcctttaagaggtttggaaagaatcttgaagagattgaaaagaagcttattgagaagaa

SEQ ID NO: 50808 - DNA, 366 bp, Glycine max
  unsure at all n locations
  Clone ID: LIB3167-082-P1-K2-A3
gggggcaaaaaaaaaaanncnaatattactnaaataataataaaaaaagaaaaaaatatgaaaagaacaagaaaaaagagaagaagaaaaaaaataaacgaagaaaagaggagaaaaagaaaaaaagaaaaagaaaaaaaaaaaaaaaaaaaaaagaagaaaaaaaaaaaaagaaaaaaaaagaaaacagagaataagaaaagaaataaagcggaaaaaaaaaataagaaaaagaaaagaaaaaaatgaaaatgaactaaaaaagaaaaaaaaaaaaaaaaaaaaaagaaaaaaaaaaaaagaaaaaaaaataaaataagtacaaaaaaaaaagaaaaaacgaaataaagaaaaaagaaaataaaa

SEQ ID NO: 50809 - DNA, 375 bp, Glycine max
  unsure at all n locations
  Clone ID: LIB3167-082-P1-K2-A4
ggccgaccacgcgnncgccactcgttcggaggatgtttgttaaaatatggtttaccccaaggcagcaagaccactaggagaggtatcatgaagtcatgatttctctactatccgagcgacctattgcgacctggtggatgactgtgagaaagagaaccaagaggaactgacatggctcagagccaagtgccaaatgtagttaaaggatcactatgatggacggattgggccatgctcacctaggggtaacagtgtgcacagaacagaaaatggatttgtagcaccatttgtgacaggaacctttataggaggctacaatgggactgggttgaaacccattactactaagggggattgtgaatccaggaagacacc

SEQ ID NO: 50810 - DNA, 286 bp, Glycine max
  Clone ID: LIB3167-082-P1-K2-B1
cccacgcgtccgattgagctagtttcaagttttctccatggcacttgttcaaccctttgcttctggttcaatctcttttcgcgatgctcgtgttttcactgcaccaaaatgctctcccaccactcactttcctcatcggaatttggttccaactcgagcatcattcatcgctggttccccactgttgattcgtagaaatcatggaaggaatggtgcatgcaaagcaatgcctgtttcaatatgatgtgtgctaatgtccctggaagggatcagtttttatgtgtgg

SEQ ID NO: 50811 - DNA, 462 bp, Glycine max
  Clone ID: LIB3167-082-P1-K2-B2
cccacgcgtccgcccacgcgtccgcttttacttagcaagacacccttttccttttcattccatcatctctttagctttgtccaaagaccatgtctgtggtggctgataattctgcaaacaatggaagccaccaagtggttttaaatgtaaacggtgatgcccccaagaagtgtgatgactcagccaaccaagactgtgtacctcttctgcagaagttggtagcagaggtggtggggacgtacttcttgatatttgcagggtgtgcttcggtggtggtgaaccttgacaaggacaaagtggtaacacaacctgggatttcaattgtttggggtctcactgttatggttttggtttactcagttggtcacatctctggtgctcatttcaaccctgctgtcaccattgctcatgctaccaccaaaaggtttccactgaagcaggtaccaagctatgtgatagctc

SEQ ID NO: 50812 - DNA, 307 bp, Glycine max
  Clone ID: LIB3167-082-P1-K2-B3
cccacgcgtccgggactcatttacactacctttcaagtctggtagccttattgggtctgggaattactttgtggttgttggtcttggaacacccaagagggacttgtcactcatctttgacactggcagtgatctcacttggactcagtgtgaaccatgtgctcgttcttgctacaagcaacaagatgctatctttgatccatcaaagtctacatcatattccaatattacatgcacatctacgctttgcacccagctctctactgctacagggaatgagccgggatgttcaaccttcacaaaagca

SEQ ID NO: 50813 - DNA, 478 bp, Glycine max
  Clone ID: LIB3167-082-P1-K2-B5
gccgaccacgcgtccgagaaatacagaagaaatggttcgtttcctgtttgtttttgcatcctaaatttcatcagctaaatgtgagcacagagacacttgttccaactcctttgtcaatgactggcctatacaatatgaatttactggggcgccaattccaacccaagatactgcggaataaaaatctcggaacctctttgcaattgagctcaaatccaacgccaatccacccaccagagcatgcggtgagcccaaagcaaatgcctgtaacaaccgacctggtccttgggcaaacaaagccagctgatgccgttccagaagaaacacacaaagaaggcattaatgacttcttgagctgcctctcttccgagtcacaagacaagttcgatgaattacagagcaaaaagctgattgatgcggactctttcaagaagctcttgaaaggcctgacagaaaaggtgtggtggcagcaggatgc

SEQ ID NO: 50814 - DNA, 436 bp, Glycine max
  Clone ID: LIB3167-082-P1-K2-C1
cccacgcgtccgaaaatattattaagatgatcaacattattggagcacttgttctactctttgcatttctcttcctcagttgtgtgtatgcacaagacacaacaacccttgtgcctgcaatcataacttttggtgattctgctgtggatgtagggaacaatgactatcttcccacccttttcaaggctgattaccctccttatgggagggactttgttaaccaccaacctactgggaggttttgcaatggcaaattagctactgatttcactgctgacacattgggtttcaagacctatgctccagcatatcttagcccacatgcatcagggaaaaacctccttattggagcaaactttgcttcagctgcatctggttatgatgaaaatgctgctactttgaatcacgcgattccgttgtcccaacagttgagtta

SEQ ID NO: 50815 - DNA, 356 bp, Glycine max
  Clone ID: LIB3167-082-P1-K2-C4
aaaaaaaaacaaaaaaaaaaaaaataaaaaataaaaaaaaaatatgaaaaaaataataaaaaaaaaaaaaaaaaaaaaaaaaaaaaaaaaaaatataaaaataaattaaaaaaaaaaaaaaaaaaaaaaaaaaaaaaaaaaaaaaaaaaaataaaagaaaaaaaaaaaaaaataaaaaaaactataaaaaaaataaaaaaaaaaaaaaaaaaaaaaaaaaaaaaacaaaaaaataaaaataaaaaaaaaaaaaaaataaaaaaaaaaaaaaaaaaaaaaaaaaaaaaaaaaaaaaaaaaaaaaaaaaaaaagagaaaaaaaaaaaaaaaaaaaaaaaagaaaaaaaaaaaaaaaaa

SEQ ID NO: 50816 - DNA, 452 bp, Glycine max
  Clone ID: LIB3167-082-P1-K2-D1
ggaaaagggccagcgagaaacaattcacaatgttgtctaacgcagcaaaaaagctggtaataacggggaagttaataaacaccagcaccgtgtttgtgtgctgatggaaatatttggttcttgcggcaatacagggtcgctgatccatgatccggtttgaaaatgtactctaggcaggataagtaagaacgttcaaagatatgagagctcacctaacatcactaaactgctggaggacatttcacaaatgatggactgtttgtgagcgtgctatgcttacatgtttgctacatcctgttgcttacgaaataaagcactgagtataataaattcctttgagataaacgagacattttttttggaaacatacaggacatgttgtcgggacattgtcactagcaggctacacgttacaaggtagaagcgtgcatatgatgataactgattagctt

SEQ ID NO: 50817 - DNA, 454 bp, Glycine max
  Clone ID: LIB3167-082-P1-K2-E3
cccacgcgtccgaattcattgaaacactatgttgttgacatcaaggaacctttatctccagagtccctgccggtacagaaacaacgcaaatatatgccaggcatcactaatagccaagtgagggaatcagcagcatttatagatcagagtagaaggatgatacccattgggcaactgtcaatgaaaaaacttgcagttgtaggacaagcttctggcaagctatggaggtggaaaagaagccaccatcagtggctagtacaatttaaatggaagtggcagaagccatggagactttctgaatggattcggcacagtgatgagacaatcatgagagcaaggccacgttcgcaggcttggccgcgaataatgtgaatctgattgtaatggtgatcatcgattggcttggactctgttcattttttaacctacaagattgatcctagaaataaggcat

SEQ ID NO: 50818 - DNA, 451 bp, Glycine max
  unsure at all n locations
  Clone ID: LIB3167-082-P1-K2-F4
cgacccaggcgtncgaaaatgaatatgagctngttctgtcacactgtttttttcatgacgaagaatcagctgtggggcaggtgtctttgtcaatgcttgacatgccagtatctttgttatgattttgagagttatcctggttctgcccctcctctaccataacaaagataatgtcttggtcaatgcttgacatgccagtatctttgttatgattttgagagttatcctggttctgcccctcctctaccatatgttttggcctcttccgcgtaggcggttcattcttggaatcctgaagtgctggcaccttttgatcattagctgaaatagtagaacatggagcctttcccagaacgacatactttcgagtgtccaaattttcaagagagttagagttgtctacaacaacttcatcccttggttcatagcctgcagtttttgctgtttgttt

SEQ ID NO: 50819 - DNA, 52 bp, Glycine max
  unsure at all n locations
  Clone ID: LIB3167-082-P1-K2-G1
gaccacgcgtncgnaaaaaaaaaaaaaaaaaaaaaaataaaaaatttatttt

SEQ ID NO: 50820 - DNA, 259 bp, Glycine max
  unsure at all n locations
  Clone ID: LIB3167-082-P1-K2-G6
aaaaaaaaaaaagaacccaaaaaaaaaanataacctataaaaaaaaaaaaataaaaaaaaaacaaaagaaaaaaaaaaaaaataaaaaaaaaaaaaatataacaaaaaaaaaaaacaaaaaaaacaaaaaaaaaaaaaaaaaaaaaaaaaataataaaaaaaaaaaaaaaaaaaaaaaaaaatacaaaacaaaaaacaaaacaaaaaaaaaaacaaaacaaaaaaaaaaaaaaaagaaagacaaactaaaaactaaaaa

SEQ ID NO: 50821 - DNA, 363 bp, Glycine max
  Clone ID: LIB3167-082-P1-K2-H1
gccacgcgtccgtacctgagctcatatatgtttcttttgaatataccacagccattgacgtctgggctgtttgttgtgtgttagctgagcttcttcttggacagcctttgttccctggtgagagtggagttgatcaactcgccgagattatcaaggttctgggcactccaacaagggtagagattaagtgcttgaaccctaattattcagaatttaaatggctacagattaaagctcatccatggcacaagatcgtccataagcgcatgccttccagaggctgttgatttgttattaagactgcttctattctgtcctaactcgaggtgcacaacttttagattccttttctcattcttattt

SEQ ID NO: 50822 - DNA, 265 bp, Glycine max
  Clone ID: LIB3167-082-P1-K2-H2
gcccaagccctatacaaccaaactctaacactttcttatttgattcagtttccatggctagcctcaaggttgcatttttggctgcagtgctctgcatggttgtggtgagtgcacccatggcacatgcagctatcacgtgcgggcaggtgacgagtagcctggccaattgcatcggttacctccagaagggaggaacgccgttgtctggatgcttcaacggagtgaagagcctcaatgccgtcgccaagaccaccgtctaccgtca

SEQ ID NO: 50823 - DNA, 342 bp, Glycine max
  Clone ID: LIB3167-082-P1-K2-H3
aatttgctagatctcacaatcatattgaagctttttttccagggccaaagagactagagtgggtgatctatatgcaaggaaatgacatgtttgaaatgagaattttgatcataaaaaacttggactaacaacactagctgctcatggaaagagggaggtgagtgatggagcacctaatgacagatatgctgcggtcaccgggtggtatgctgatggttcctggccaggagaagcacacacatataaaatagaaaaggacctattgcacgggaaatcagaattccaagagcttgttgtattagagtcttctagacaaggaaaggatgcaattcttgatgggca

SEQ ID NO: 50824 - DNA, 317 bp, Glycine max
  Clone ID: LIB3167-082-P1-K2-H4
gcgttctttttcagctccttacctttttcttatccaatagcttgtagtcaccaaaatagtgtgatgcgatggtgtcttctaatgcgtgaatctgtgcatcttccacgcaatcatgcttgcctgtgtctcctaccatttcaaacacgcttgttagtccttttcttaatgtttcgtcaccaagaagttaccttgtgaagaaaaagcatgtgaaatttagcaaaaacatcagtgctgttgcttgttgcatcaacaacaacaactgaggtaatttattgagttcatgctttcatcatgggcttagtatgaaatttggtggg

SEQ ID NO: 50825 - DNA, 287 bp, Glycine max
  Clone ID: LIB3167-082-P1-K2-H9
cttcccattgagcggcttgtttaagctcagtggtgaggaaagaaacgataccatggaaaaaattaaagatgcttgtgaaaactggggattctttgagctggtgaatcatggcattcctcatgacatattggacactgtggagaggttgaccaatgagcactacaggaaatgcatggaagagaggttcaaggaattagtggcaagcaaaggtctagatgctgtccaaactgaggtcaaggatatggactgggagagcaccttccacttgcgtcaccttcctgaatcaa

SEQ ID NO: 50826 - DNA, 123 bp, Glycine max
  Clone ID: LIB3167-010-P1-K1-G10
cccactcgtccgcacaaacacattcttttgcataagcgcaaattgatttgatagaggagaaactggaaacactaaaataggactaactataagaaaaaggattatactgggctgccgttttgt

SEQ ID NO: 50827 - DNA, 126 bp, Glycine max
  Clone ID: LIB3167-017-F4-R1A
gtccgtagatgtgtagccggctagccaggtgaggtgggaaaagtcgaacggcaaggatgaggaagcgtcagagtgaggctctaagagaagctatctcaggaatcagggctgatgccaaggaaaaga

SEQ ID NO: 50828 - DNA, 158 bp, Glycine max
  Clone ID: LIB3167-029-P1-K1-A11
cccacgcgtccgaggtggaattggaaaaggtggtggcattggaggaggaataggtaaaggtgcaggttttcaacggtggtgccggaggcttttcccaaccaaaaaaaaagtcgtgccttccacagaatccaaccttacgccccccaccctacgaccct

SEQ ID NO: 50829 - DNA, 143 bp, Glycine max
  Clone ID: LIB3167-049-P1-K1-B9
gccactgtctgttaacttgagcaatcactctgttccttcgcttctatcgttcatggagcttgggaggcgccaagatcagagcctctcccagcggaagggccagaagcggaagctcgacgaggagcagcaccacgaggaccgcc

SEQ ID NO: 50830 - DNA, 252 bp, Glycine max
  Clone ID: LIB3167-049-P1-K1-H12
acgctttttcaagaaaccaaagaattggagattagcatgtcaaacaactgttggtaaaccagattgcagaggtgcggttgtgattcaacaactaccagagtggaaaggacacgaatggaaatatgcaaagcctggagagtcggactgggagtcggagtaaaggaaatgatatatatataaaacgaatttcttcctaagacatttttgttttcgcttcattgcaaaccatgaagaaagccttggatacctgca

SEQ ID NO: 50831 - DNA, 450 bp, Glycine max
  unsure at all n locations
  Clone ID: LIB3167-078-P1-K2-F4
ccgtccgatcactttaccaattnggctaaagtatatttcacttttctgtttcantcactactaatacccagctttctggggagatgagcttcatactgtcgtctggacagtgcgnnntctatcttcccnncttctagnntgatgtgttgcnnctttgcnntggggaccttaatacacaagaccttttgaccatcatcatggtggaggatggcacgtctccaagtatacctactaaccatggagaagttacctcactcgtttcaattggacaaaagcatctgtgctcagtgttttcaatcaaaagaatgatgtattctcttttgggaagatttgacaatgcagcttcaagccttgtctcctggaaacttgtgctggcaccggcaactgnctattatttatcttcaaaaggatcaactttgggatgaaatagactttgaattttcttggaaa

SEQ ID NO: 50832 - DNA, 457 bp, Glycine max
  Clone ID: LIB3167-017-F4-F1A
gcaagttaaaacacgagtacttaaacttagcaccactaaaattatccgatgttgcaaagcacttgaaacataaatgtcaataacaagaaatactagccaaaaaatactcatccaacaaaactgtagaacgatgaaaaattctgtccaacctatcatgacaatatattaagtgcaatcagaaattcactgaattttaagaaccactactcaaaagacacggtacgatttccccatggtactcttcagatataggcagcgaacgttctgccaattctttttcagcaaagagacaagggagttaacactcagttgtacattttggaagatttgcttttcctccatgctaacattccccacagctactcccatgcagagaaccttcttaagctgggacttgaccatgggcttggtctcattaacctttgactcgagagattcttggtgagtcacaagtgta

SEQ ID NO: 50833 - DNA, 577 bp, Glycine max
  unsure at all n locations
  Clone ID: LIB3167-027-P1-K1-B5.F2
aacttagcaaaatttttatatacaaagaaataagaaaatgaaatgaaaagcgatatcacgtcgcaaaactatacttagcaaatactaacaaaactttagtggcagaacatactaatgtagctcttatttatttagcaaaggaaatgttggtggtgcaaaggaagccctcttgacaaacctccccttcattctgggtctcttctcagcattcaatttcctaacttcgtaccttattttcttcgagaacaacctcgttcggcgcttctctctgtatcttgacaccctcgcctctctgcccccgtctattatcactggatgaatcccaaatccacccatttcaccgcaaggatgatgatatgccgtttcgcaacttcccatgcattgtttccagcactcatcagggtccaagtttggtttgtcagcggtggtccacggagatttttggctagcccaggcgatgattaccgcctcatagtctagctgcaacgaaatcttngtctttttcacctcatcatcattctctttcttcgctcctaatcattccccaatcccaatcacaaacttcaccttttacacg

SEQ ID NO: 50834 - DNA, 296 bp, Glycine max
  Clone ID: LIB3167-027-P1-K1-B5.R1
cttgtttttttcccatcaaaacaatcattccccttgttaccaaaaccacactgtaacccccctttttttggtattggcttcaaatgagttcggctactaagaacgcggcaaacggctgtgtgggccaaaacggcaagagcatgtgacagctgcataaccaaacgtgcacttggtactgtgctggcgatgatgcttttctctgccaggcctgcgactcttctgttcactcggcgaatcctttggctcgaagacactaacgagtccgcttgaaaacggcgtcctacaagtccactgat

SEQ ID NO: 50835 - DNA, 553 bp, Glycine max
  unsure at all n locations
  Clone ID: LIB3167-027-P1-K1-B5.R2
cccatcaaaacaatcattcccctgttaccaaaaccacactgtaacccccctttttttggtattggcttcaaatgagttcggctactaagaacgcggcaaacgcggttggggccaaaacggcaagagcatgtgacagctgcataaccaaacgtgcacgttggtactgtgctgccgatgatgcttttctctgccaggcctgcgactcttctgttcactcggcgaatcctttggctcgaagacacgaacgagtccgcttgaaaacggcgtcctacaagtccactgatgaacaacaacaacaacaacaacaacaacctnccacgtggcacactaagaaacctcgaacgccgaggcacgggaaacattctcgtaacaacaaccctttccatttggtccctgaagagggttcggaggaggcgaattcccatgatgagaacgaggagcagcttctttatagggtccncatattcgacccttntgttgctgagctatgtgggactaatagttctncttctcctgttacttcaactgatcaaggagtagttgctgctgctga

SEQ ID NO: 50836 - DNA, 244 bp, Glycine max
  Clone ID: LIB3167-027-P1-K1-B5.R4
ttcgtgtcttctagccaaagattcgccgagtgaacagaagagtcgcaggcctggcagagaaaaacatcatcgtcagcacagtaccaacgtgcacgtttggttatgcagctgtcacatgctcttgccgttttggccccaaccgcgtttgccgcgttcttagtagccgaactcatttgaagccaataccaaaaaaaggggggttacagcgtggttttggtaacaggagaatgattgttttgatggg

SEQ ID NO: 50837 - DNA, 414 bp, Glycine max
  unsure at all n locations
  Clone ID: LIB3167-001-Q1-K1-A10
agactttcaatttctttgtaattcctctctacggtcggtctcgttcatcactctcgacctacacctcacttgctcttactcattcctctccacccacacactctcccttgtgacttcgagaccctcattctcactttcagtcatgacaaccttcgtttagatcgcacactctcggtggctattacctcgttcagatcgcacactctcatggtggctacgaccttcgttttctgttgattcaaatcgcacactctcttcatacaagtcacatgaagaggtcaaacgatttcgattcaaagccattcctaattgggatgatattatagacctatgtgcaaaggatagagctactggactcgngaaaagaaatgcattagatgtagatgatatcatgagcaaagaagcannatgaga

SEQ ID NO: 50838 - DNA, 416 bp, Glycine max
  Clone ID: LIB3167-001-Q1-K1-A11
gatcgagataactagaaacagtgtgatgaaaatgaaggtccttgttttcttcgttgctacaatttttggtagcatggcaatgccatgcgtacgatatgttccctctccgaatgaacactggctatggtgcccgtactccggaggtgaaatgcgcaagttggaggcttgctgtggaagcacacaacatctttggctttgagaccattcctgaagagtgcgttgaagcaacaaaggaatacatccatggcgaacaatatagatcagactccaaaacagttaaccaacaagcttacttttatgccagagacctcgaagtccatcccaaggacacatttgtgttcagtatagatggcaccgtactctctaatattccatactacaaaaaacatggatatggggtggagaaatttaactcg

SEQ ID NO: 50839 - DNA, 414 bp, Glycine max
  Clone ID: LIB3167-001-Q1-K1-A12
cccacgcgtccgcgttgttgttcccttcttttttctttctccgccccttttttgttgttccttcttctcgttcgtcgctttgtgatctctctctgcaaccatgtccgtcgagaaagagagagagacccaggtttacttggccaagcttgccgagcaggccgagagatacgaagaaatggttgagtgtatgaagaaagtagcaaaacttgatcttgatctgactgtggaagaaaggaaccttctctcagtgggatacaaaaatgtgattggtgcacgaagggcctcttggcgcataatgtcctcaattgagcagaaggaagagtctaagggaaatgagcacaatgttaaactgatcaagagttactgccaaaaagttgaggaggaactctccaaaatctgtggtgacattctgac

SEQ ID NO: 50840 - DNA, 209 bp, Glycine max
  Clone ID: LIB3167-001-Q1-K1-A2
atcgggcgagatcattatctcttaatgacaaccttgtttcttaaggtttatattttggagtttacttagtgatgatggatgcgctattttctgcactggctttgatacagatttcaggttgagtttgtttcgttatctcttaatgacaaccttgtttcttaaggtttatattttggagtttacgtagtgatgatggattgttattttca

SEQ ID NO: 50841 - DNA, 442 bp, Glycine max
  unsure at all n locations
  Clone ID: LIB3167-001-Q1-K1-A3
gccgtaccggaacggcgggcccggcccgacccacgcgttatttccgatggttttttttggccatatttgccgtttccccgccaaaccccctgacacttttttgccggaaagtctcaccagaatccgggccggaaccttttcgtccgagctccgcgattcacttccggtctgtgggtcgagttgatcgaggtgttcggagaccttctcgagtagaatataccgcaaggattgggtacaaggaagagaccctncactcatgaatcgcgagtacaccagtgatatcattaagactttgaaggaaaatgggtatgagtatacatggngtactgtcacggtgaagcttgctgaagcctatggattctgttggggagttgagagggctgttcaaattgcttatgaggccagaaaacagtttcctactgagacaatttggcttaccaat

SEQ ID NO: 50842 - DNA, 274 bp, Glycine max
  Clone ID: LIB3167-001-Q1-K1-A5
ctatctttatataataatataaataagaataaaaaaataaaaaaaaaaaaagaatctatataaatataaaaataatatatataagggacaaatagtaaatcgaggtacccattttatgataaactttccttccatttttgttcctctagtaggcctagtatttccggcaattgcaatggcttctttatttctttatgttcaaaaaaacaagattttttagatacagaaaacaaaagtaaaattctggggttttttattccccaattataatact

SEQ ID NO: 50843 - DNA, 427 bp, Glycine max
  Clone ID: LIB3167-001-Q1-K1-A6
gtctatggtaaaagtggaagaagaagaggagcagcacgccactacaccaattcacacatcatcacctttcctcttatgtgttactgcttcaaatcatgagcaaaaggagaacttgggtgtgcatttttgtgcttgtttatggcttgctcttcacatcttcgtggaatttcctcaagtccatgatttcgtggtacaagttgcaagctgatcagtcatcaacaacttcatggtggccagcactttatgcctcggtgcttcttggtgcggtttttggggtgctttggatggttgcagctctcgctgttgtggtgcctgcggttctggtcacgtggatcgccatagtggtgttgttggctttctttggtaagcctaagagaactttggttgcggaggggagaatgattacaaaagagatttttggttttgt

SEQ ID NO: 50844 - DNA, 403 bp, Glycine max
  Clone ID: LIB3167-001-Q1-K1-A7
gtgagggcgagatcacagaattggtgtgagagagatgggttcgtccgtgaagctttcaaggagggccttggaaactgagatgcccgttatggttcacatgcaggaattgcaacgaggagctaagaatgccttgtctttggcccagggggtggtttactggcagcctaccaagcaagcgttggaaaaagtgaaagaacttgtatctgagcctttaattagtcgatatggtaacgatgaaggtattcctgaactcagagcagcattagtcaaaaagatgcgtgatgaaaataatttgcacaaatcttcagtaatggttacatcaggtgccaatcaggcatttgagaatctagttgctactctctgtgatccgggtgattcttgggatatgtatgctccttactac

SEQ ID NO: 50845 - DNA, 321 bp, Glycine max
  Clone ID: LIB3167-001-Q1-K1-A8
tcgcggacgcgtggggtgagctataagctagtttatcgtgaggagaatatgaagttgtttgttttctttgttgctgcagtagttttggtagcatggccatgccatggcgcaggctaccaaaggttccctctccgaatgaaaactggctatggtgagcgttcttcggaggtaaaatgcgcaagttttaggcttgctgtggaagcacacaacatccgagcctttaaaaccattcctgaagagtgcgttgaaccaacaaaggactacattaatggcgaacaatttagatcaaactctaaaacagttaaccaacaagctttcttt

SEQ ID NO: 50846 - DNA, 415 bp, Glycine max
  Clone ID: LIB3167-001-Q1-K1-A9
cccacgcgtccggccaggcaagccccactcaaccaccacacctctcctcgttcacgctacccctttctgctcttcttctacctttcaagttttaaaagtataaagatggcagagacattcctatttacctcagagtcggtgaacgagggacaccctgacaagctctgcgaccaaatctccgatgctgtcctcgacgcttgcctcgagcaggacccagacagcaaagttgcctgcgaaacatgcaccaaaaccaacttggtcatggtcttcggagaaatcacgaccaaagccaacgttgactacgagaagatagtgcgtgacacctgcaggaacatcggcttcgtctcaaatgatgtgggactggatgccgacaactgcaaggtcctcgtcaacattgagcagcagagccctgata

SEQ ID NO: 50847 - DNA, 212 bp, Glycine max
  unsure at all n locations
  Clone ID: LIB3167-001-Q1-K1-B1
gttcttaattcatgcttattactagcaacgctgagtatcggatggcaaacaacananagggaaatatatgtctcctttcattttggccgggaattattgtattagttttgaatctattaaggtcagtctagtgttgacgagtttaagtaatttatatgggatcttaagtttgttgttgtacactaaaaaataatattgaaatttgacttttt

SEQ ID NO: 50848 - DNA, 419 bp, Glycine max
  Clone ID: LIB3167-001-Q1-K1-B10
cccacgcgtccggtgaaaatggcgcagtgtgtggccaacacattcgtgcaaggaaaaccctttcttccagttgcagcagctcccactaaaaatgtaaccagaatttattacaattgaaattcacaacgtttgattcgtggagttaataacgttgtttgattgcagcaggttcggagagcggttcagtgcggtgtgtggtgcaagaagaaggagatacacccgcaattctacgaggaatcgaaggtgtactgcaacggggagctggtgctgacgacagttgggacccagaaggaatacgtggtggacgtgtggtcggggaaccaccccttctacctcggaagccggtcggcgtctatggtcagcgacgaccaggtcgagaagttccgcaagaagttcggggagctcaaagagatcatgga

SEQ ID NO: 50849 - DNA, 354 bp, Glycine max
  Clone ID: LIB3167-001-Q1-K1-B11
ccattcagggtattgtaatcaactcatggctgagggaaggctgtgctccctgggagtgcagacaaacactatcctatgctggcacgaatgcatgagacactggagatgattacacgcttgctgaagatctaggctcgctcaaaggatccacgtgaacattcatagtggggaatcacgtcaccatattcttcaaagatatgcaagagctcttgaatgaccaagagtatgatatgaatgttctagggcacatatcatacaatattgacattggagctgactgatactgtagaccaaaggcgggatacactaatgaccatatgaataatgctcactcgttatacggaggcattacaa

SEQ ID NO: 50850 - DNA, 418 bp, Glycine max
  unsure at all n locations
  Clone ID: LIB3167-001-Q1-K1-B12
cccacgcgtccgctaaacacggggcactggtttcgaaccctcgttgtggttaggtcttcttcacctttcgaattttggaatccatgggtcagggaactccgggcggcatgaaccggcagggcgaccggaagccggacggcggcgacaagaaggagaagaagttcgagccgtcggctccgccggcgcgcgtggggcggaaacagcggaagcagaaaggtccggaggcggcggcgcggttgccgacagtgactccggtgacgaagtgcaaactgcggcttctgaagctggagcggatcaaggactaccttctgatggaagaggagttcgtggcgaatcaggagcgactcaagccgcangaggagaaggccgaagaagacagatccaaagtcgatgatctccgaggcttctccatgagcgt

SEQ ID NO: 50851 - DNA, 406 bp, Glycine max
  Clone ID: LIB3167-001-Q1-K1-B2
atgccttcaacctgtccgatcaggacaggaacggcctcatatccgccacggagctctgccaggtgctgaaccgcctcggaatgaagtgctccgtggaggaatgccacaacatgatcaaatccgtggattccgacggcgacggcaacgtcaacttccccgagttcaagcggatgatgagcaacaatcgcgaaaatgctagcaatgctgaagaaaaaacagattaggccctttggatttgaattttatagataggctaggcactttcgctgcacaatctcttgactaataaatctaggtctgttatgatccgctatttcttttctccctcgttcctctttttatatatatatatttatatatatttagaaatcgaatgaaaactattcctatgcttgccgtttcagtc

SEQ ID NO: 50852 - DNA, 370 bp, Glycine max
  Clone ID: LIB3167-001-Q1-K1-B4
cacacttcacatccaaacacgagcataaatgatgggtgagttgtgtccacgaaatgagataagatgaaccttggtatttcccctatatataaaaagccttagaatagagtatagaagataaagaaaagagaaatggcaacagaaacaaaagtggcagtattaggtggcatcaccgaagtgcagggagctgccaacagcgtcgagatcaacaatctcgctcgctttgctgtagaggaacaaaacaaaagagagaattcagttctggagtttgtgaaggtgattagtgcacagcagcaagtggtttctggagtgaattactacataacattggaagcaaaagatggtgagattaaaaatgagtataaagcga

SEQ ID NO: 50853 - DNA, 294 bp, Glycine max
  Clone ID: LIB3167-001-Q1-K1-B5
caagagaggattggcagttgaggatccctctgccccacatggtcttcgccttgtgatagaggactacccttatgctgttgatggacttgaaatatgggatgctattaagacatgggtccatgagtatgtctctgtgtattacccaacaaatgcagcaattcaacaagacactgaacttcaagcatggtggaaagaagttgtggagaaaggtcatggtgacttaaaagataagccttggtggcctaaactgcagactgtggaggatctcattcaatcctgctctattatcatatg

SEQ ID NO: 50854 - DNA, 386 bp, Glycine max
  unsure at all n locations
  Clone ID: LIB3167-001-Q1-K1-B6
gaaacaatggccaatgtttcaattccactcccacgaaacggtttctccaaacccaattactcgacaaaacgcccatgtttcaccccttcagcttcaacactcagaatttcttgctctggagtggctgagtttgatggatctcatcagaaaaaaggaggtttgtttaatttcaatggaatcaagggcgtggcttgtggtattcttgcagcttgtgctgttacttctgctgcatttcctgttactgctgctactcagaggcttcccccattgtcaactgagcccaatcgctgtgagcgtgcatttgttggcaacacaattggtcaggcaaatggtgtatatgataaaccattagatctncggcaatgtgattttacaaatgagaaaac

SEQ ID NO: 50855 - DNA, 421 bp, Glycine max
  unsure at all n locations
  Clone ID: LIB3167-001-Q1-K1-B7
gaggttgatcattttaatgatctggatgatcttttccagaacagtggctttaaaggtgtttacaaggctcgcacaggagaagcacaagatggatgtgctgtattttggaaagacaagttattcaaacttttgcatcaagaagatatagagtttcaaagatttggtatgcgtaacaatgttgctcagctttgtgtttttgaggcaaaccatgataagaaagaatctgatgcatgtaacctaacaacaatgacaccatccaccggaaaaagaagatttgtagtaggaaatatacacgtgttgttcaacccaaatcgtggtgacatcaaactgggccaggtcagacttttacttgataaagcttacaagttgtcacaagaatggggcaacattcctgttattattgctggngatttaaatagtg

SEQ ID NO: 50856 - DNA, 345 bp, Glycine max
  Clone ID: LIB3167-001-Q1-K1-B8
gccacgcttacgggcgaagcgaggacacgcaggatcggcgggaaacaagatccgcatgtcgctgggtctggcggtggcgcgtaccgtgaactgcgcccacaacacctgctcgaagaacctctacgatctagtggttgatgagatcagggaccggctgaagccagtaccagcagactgcgtgtgagacatgggtattgccaccggaaggaagggactgcgccatatacggaagaaggcgctgcctgtcgatattatccgccagcgcaagtttattggcacaacggactgagtcttcacgtccttccaagatcatgctggagctatcactgatcccaccggtgaaat

SEQ ID NO: 50857 - DNA, 426 bp, Glycine max
  Clone ID: LIB3167-001-Q1-K1-B9
cttttgcattctctctctcgacaccaaacaaaggtagttgtgattgcagcaaacaatgggtgtctccttcctctcgacttgcccttccctgcttccactcgttgcttatgatacaccaccctccaccagataccaacctcgttcagtgtccatttgttgtaataaaaccataagcaatgttagtgatgaagagccgttccattggagaaggagagaaattcttaaatgcgctggggcaaccgttggcttggaattgattggaagctccggatcgcttgttggaatggctaatgctgctgacttgatacagcgcagacagcgttctgaatttcaatctaaggttaaggaaacactttttacagccataaagggaaatcctgatcttatcccatccttactgacactggctctaaatgatgctttgac

SEQ ID NO: 50858 - DNA, 374 bp, Glycine max
  Clone ID: LIB3167-001-Q1-K1-C10
cccacgcgtccgtgcttccacttctgattcagaaactcttaggcattccacattctcaaccccgaaccctaagagcagagcgaaaatgacaaccaccttcgcgaccggcgcaagactcggtggcgcattactggcatccacctcatctcgtctcacctcaggggttgtgaaatccccagtgattgctaggaatcccttgaggcaagctgtggcaatgggaaatgggaggattacatgctttgagaggaattggctgcgggcagattacagtgtgattgggtttgggttgattgggtggctagcaccctcaagcataccggctatcaacggtaaaagtctgactgggctcttctttgagagcataggggctgagc

SEQ ID NO: 50859 - DNA, 403 bp, Glycine max
  Clone ID: LIB3167-001-Q1-K1-C11
atgaaatgatagtaagaaattatcgcatcaaaaaaaaaaaaaaaaaaaaaaaaaaaaaaaaaaaaaaaaaaaaaaaaaaaaaaaaaaaaaaaaaaaaaaaaaaaaaaaaaaaaaaaaaaaaaaaaaaaaaaaaaaaaaaataaaaatggaaaaaaaaaaaaaataaaaaataaaaaaaataaaaaaaaccgcgggggcggtttttaggggaccaattttaatttccggtgattggggggttattttttttttttgggggtgcctaaattaaatattagggcccgttttttacaacttttgaatgggaaaacccccggggttgccaaatttaattgctttggaaaaattctcctttttcccagggggggtaaattaaaaagggcccagaccaattcctttttta

SEQ ID NO: 50860 - DNA, 341 bp, Glycine max
  Clone ID: LIB3167-001-Q1-K1-C12
cccacgcgtccgcccacgcgtccgcccacgcgtccgggcgaacatatttgattgctgttagttttcaaggttctgtagattatgtgacaaaaaaaaaaaaaaaaaaaaaaaaaaaaaaaaaaaaaaaaaaaaaaaaaaaaaaaaaaaaaaaaaaaaaaaaaaaaaaaaaaaaaaaaaaaaaaaaaaaaaaaaaaaaaaaaaaaaaaaaaaaaaaaaaaaaaaaaaaaaaaaaaaaaaaaaaaaaaaaaaaaaaaaattaaggggggggcgcattaaaaaaaaaaaaaattatttaccccttggttgaaaaaaaaaatttttttttagggccacctaaaatt

SEQ ID NO: 50861 - DNA, 73 bp, Glycine max
  Clone ID: LIB3167-001-Q1-K1-C2
tggtggcagaagatcaagactgacaagccttatggaattaatggtggcatggctttgagggaaggagttgatg

SEQ ID NO: 50862 - DNA, 390 bp, Glycine max
  Clone ID: LIB3167-001-Q1-K1-C3
aaaacactataccaataaaaccattggtttttgaaaaacccctcactcttaataactacactagctagccacatacaatgtcgaccaaatttaaggtgtttcgtgaattcacaagcgaagactcattcctaaaccaagttatccctgaaaacatcacccgaattccaagttactctgtccctcgctagagactacgatggcaacaactcaaccaacggaaagttcattccttactgggacactgaaaaggtcactcccgaagtgataaaaaaattcaagaaaaaatacgaacccaccgcactgagggttaaggttcttgtcagcattggaaacaaaaacaaacaatttcctttcaccattggctcggactcgaacagcgaagcatgggtc

SEQ ID NO: 50863 - DNA, 411 bp, Glycine max
  Clone ID: LIB3167-001-Q1-K1-C4
gtgcttcaaagactgaaaattgacatacggcggtggcgaaaatgagtcctattggtgctgttggatttaattgaacacttgcggtggatgtttcttagcattttaaaatcattcatgcatggcgctggagtaggaaaaacttatattaacatataactgacgagggtatgaggttattgttacttaatggatacaactctattttctgtttgaagatcatgatccttcggtcatgtgtctctcttcacattgtttgaggttggcaaatttgtacgtgcacgctgctcaattctagaatcactgcaccggacctacattgttaattcatgatcctttgcacatgagactctagacatgctttctaggctggcgaatgagatgtttatgttctctactaagaggacagtgcac

SEQ ID NO: 50864 - DNA, 377 bp, Glycine max
  Clone ID: LIB3167-001-Q1-K1-C5
cccacccgtccgaaaaaacatagcagcaaagcttcaatttccgcttccttcaatttttgaacaagcttttcgcttccctagctaagcacctacatcacagatctttaacgataaaataaaaatggatccaaacgcggtgaagtccactctctccaatctggcgtttggaaacgtaatggcagcagctgcccgtgattatcagaaggaattgcttgctcaagagaagactcaaggatcaagttcagtacatgaggaggttgaccttgacgagttaatggatgatcctgagttagaaaaattgcatgcagataggattgcagctcttaagaaaagagcagagaaacgggaggaatggaagaaagaaggtcatggggaat

SEQ ID NO: 50865 - DNA, 371 bp, Glycine max
  Clone ID: LIB3167-001-Q1-K1-C6
atcataaaccccttccagagaacaagaatcaatgaatggcacctatgactggtgtgagcctttcaagccccagggtttttttcaacgcattaccctcaccgcaaaacacgtacgccgtaaagttcgcagttccactcagccaagggatgcgacttggtagtgtcaggttgggtcgggtgatgaggatccgacccgttcgcgcagctccagagcgcatttcggagaaggtggaggagagcataaagaacgcgcaggaggcgtgcgccggcgacccgacgagcggcgagtgcgtggcggcgtgggaccaggtggaagagctgatcgcggcggcgagccacgccaaatacaagcaaaaggaaaaggactccgac

SEQ ID NO: 50866 - DNA, 407 bp, Glycine max
  Clone ID: LIB3167-001-Q1-K1-C7
caaaaaccaataatctctgatctgagttcctgacatgtccatcgagctagattctgaatccattcccacacccacggcccaagcccaagaccgatccaactcccgctgcgcactgctattttcctacagctgcctcggcccacggcgtcgttcctcatggtgggagcgtgtccgctcccactcccactccactccagcctcaaccggtgaccggtggtggtcgcgtgggctcagggcgctgaagaagcttcgcgagtggtcggagatcgtagcggggcccaagtggaagaccttcatccgtaggttcaaccgcaaccgccccaacaaacgcatacccacataccagtatgaccccttcagttacgccctcaactttgacgaggggcctaatggggatttcaacgacg

SEQ ID NO: 50867 - DNA, 391 bp, Glycine max
  Clone ID: LIB3167-001-Q1-K1-C8
cggacgcgtgggcggacgcgtgggcgacacgacatgccgtcgatactgaaactcttctccctcccaaaacccttaaccctcagaccgcaattttcgcgccacccgacaacaacctcggaccgtggcctcgtattccacgaaaaggtgctctaccttaaagccctcaaagtgaaccccaacaaggcctttcgcttaaaccccaccctccgctcttcccctctctcaaccctaaaatcagtgacgcgctccctttcttcgttgggcattccacgcgccgccatgggtcgcatcctcgacatgctccccgtgctcctcacgtgcgacccctatttacaattctaccccctcctcgacttcctcctccacgaggtcccgatcctctaccccgacg

SEQ ID NO: 50868 - DNA, 424 bp, Glycine max
  Clone ID: LIB3167-001-Q1-K1-C9
ctttcgtcagtttcgggggaagagatccagcagcaatggtgtacgtcaaggctcagaaatcaaaagcctacttcaagagatatcaagtcaagttcaagagaagaagagagggaaaaaccgattaccgtgccaggattcggttgattaatcaggacaagaacaaatataacactccgaaataccgatttgtggttcgctttagcaacaaggacattgttgcacaaataatatctgctagcattgccggcgatttagttcttgctacagcatattcacatgagctgccacgatatggtcttgaagtaggacttacaaattatgcagcagcttattgcactggtctcctgttggcccgaagagtcctcaaaacacttgaaatggatgaggagtatgaaggaaatgttgaggctactggagaggatta

SEQ ID NO: 50869 - DNA, 206 bp, Glycine max
  Clone ID: LIB3167-001-Q1-K1-D10
cccacgcgtccgatcagtttatattgagattcagtatcgctaaaaaactttacaataggggtgctctaaaaaaaaaaagatgccttcacatataaaacaaaaatatacaaaattaagtattatacaatattaaaatttttatttagaacatttaattaatataaaaataaaatctctttataaaaactaataaaaatgggggggcc

SEQ ID NO: 50870 - DNA, 424 bp, Glycine max
  unsure at all n locations
  Clone ID: LIB3167-001-Q1-K1-D11
cccacgcgtccgtgttgatcgagataactagaaacagtgtgatgaaaatgaaggtccttgttttcttcgttgctacaattttggtagcatggcaatgccatgcgtacgatatgttccctctccgaatgaacactggctatggtgcccgtactccggaggtgaaatgcgcaagttggaggcttgctgtggaagcacacaacatctttggctttgagaccattcctgaagagtgcgttgaagcaacaaaggaatacatccatggcgaacaatatagatcagactccaaaacagttaaccaacaagcttacttttatgccagagacctcgaagtccatcccaaggacacatttgtgttcagtatagatggcaccgtactctctaatattccatactacnaaaaacatggatatggggtggagaaatt

SEQ ID NO: 50871 - DNA, 424 bp, Glycine max
  Clone ID: LIB3167-001-Q1-K1-D12
cttagctttcctttccagttcatacttcatcctattattactttccctctttgcattccaaatggccactgttgaggttgcacagcaaacaccaacaactgtgacagagaatgaaacaacgactgaggtaaccaagattgaggaaactaccccagaacagccagccaccgaggttactgccccagaaacagtcaacgaagaagcaaaagaggaagcagcagttgagactaatgaggcaacagaagttacagaggaagggaaggctgagaaaacagaagaagaagaagaagtgaaagaggagactaaagaaaccgaatcagcaccagtggaggaagagaagcaggaggagaacaaaccagctgaaaccgtagaggaacccaaaacaaaacaagtttctgtcgagaagactgaagtttaagcccat

SEQ ID NO: 50872 - DNA, 93 bp, Glycine max
  Clone ID: LIB3167-001-Q1-K1-D3
cccagccttctaaccaaaagaatgggggggaaagtgactcttccaccaccaccctttcgcggcggaaaatgtttcttgtgggggacgagggtt

SEQ ID NO: 50873 - DNA, 404 bp, Glycine max
  Clone ID: LIB3167-001-Q1-K1-D4
aatatattccattctctctgggtatttccctacctctcccttcaagatgcaaatcttcgtcaagaccctcaccggcaagaccatcacccttgaggtggaaagctctgacaccatcgacaacgtcaaggccaagatccaggacaaggaaggaatccccccggaccagcaacgtctcattttcgccggaaagcaacttgaggacggccgtacccttgctgactacaacattcagaaggagagtactcttcacctcgtcctccgtctccgtggtggcatgcagatcttcgttaagacactcaccggcaagaccataaccctagaagttgaaagctccgacaccatcgataacgtcaaggccaagatccaggacaaggagggtatccccccggaccagcaacgtctca

SEQ ID NO: 50874 - DNA, 309 bp, Glycine max
  unsure at all n locations
  Clone ID: LIB3167-001-Q1-K1-D5
gatttttcacgaacctgacaaaaaaaatcattcaatagagataccgaaccttctcaaaaaatgagacggtcatctctagtgagtgcccttcttatagcaaacattctcatggcaacacgccttaccctcactcttnctttctctcgctccatctctccactcttatctcgttccctttcacaactcaaacaattcccaaaatcccacccttgtcccctctggtcctactncttctccttctgcctccacacactccgcaagtccacttcccctattcgcgcctcttcttctttttctccctccatggct

SEQ ID NO: 50875 - DNA, 344 bp, Glycine max
  Clone ID: LIB3167-001-Q1-K1-D6
ggccttgattgttagcatatagattggcattccttgcaacacggatggagcagtatgttgcaagacagtctatggatttggttgaccaagcatacacaaaatttgtgagcataatgttcgtgactttggaagaagatgcgcaaaccgatcccaagtctgcagacatttttcttattgaacactatgccgcatttcacaatagttagaatgaccttgcaaatgtcgctcccactatggcgaagttgtatcatcacgcttgtgaagcctacgagcaagcttgcacacgccatattactgagatgatctactatgaattcgaacgccttttccaatttggtcgaaag

SEQ ID NO: 50876 - DNA, 409 bp, Glycine max
  Clone ID: LIB3167-001-Q1-K1-D7
caaagtgagttagagttctcattctcatggctattaccggcgatattttccggcagagcataacggaaatgcttgcggagtccccttccggtgcgccagaacttcacgttctcgccgtcgatgacagcctcgttgatcgcaaggtgatcgaacggttgctgaagatttcttcctgcaaagtgacggttgtggagagtggaacgcgcgctcttcagtatcttgggttggagggagagaacggttctcttgggtttgatagtgttaaggttaatctcataatgacggattattccatgccggggatgacaggatatgaattactcaagaaaatcaaggagtcttctgtgtttagagagattccggtggtgatcatgtcatcggagaatgttttgacccgaattgataggtg

SEQ ID NO: 50877 - DNA, 107 bp, Glycine max
  unsure at all n locations
  Clone ID: LIB3167-001-Q1-K1-D8
aaaaaaaaagaaagaacaaaaaaaaaaaaaaatagagggggngnaaaaaaaaaaaggaaatgaaaaaaaaaagagaaannngaggaaaaaaaaaaattggttttttt

SEQ ID NO: 50878 - DNA, 423 bp, Glycine max
  Clone ID: LIB3167-001-Q1-K1-D9
gtgtttgcatgaaagtgggcttgagataattgtgcctcttgtatgatggaatccctttggaagcttttgtatttgctggagcctgcgcctgtcacacttatcactacagctgtggctgtgacatttggtgctgcttttcgagctctaaactatgggaaagaaatggagcgtaatcgggacttctctgaagcatcgattacattggataggtctcaggcattgatgatcccagtgatgagctcttttagcttgcttttgatgttctacttgttctcatctgtctcacagcttctcactgcattcactgctgttgcttctgcgtcctcccttttcttctgcttgtctccttatgctgcctatttgaaggcacagtttggtttagctgatccatttgtttcacgctgttgttcaaaatctttcaca

SEQ ID NO: 50879 - DNA, 334 bp, Glycine max
  unsure at all n locations
  Clone ID: LIB3167-001-Q1-K1-E1
atcacacgaatgtcgcacaccaccgcccgttcggttccgtgctccgtcgccgtcgacttctcgccgttccacctntaaccgttccggtcccgccgccgtttccgctgccgcagatctatcctcatttcctgcaattcctctcgccgcagatccagctccgacaactctcacgacaacaacaacaaaaacgattatctcgaagcttctctccttctctcagaaacattctcccactatcatatgtggaagcatagatttcaaccggagtttcaatggaaatcgtctacaccgtcaattcctttgtccagaacggatagtagtttatggagacatg

SEQ ID NO: 50880 - DNA, 230 bp, Glycine max
  Clone ID: LIB3167-001-Q1-K1-E10
cccacgcgtccgcccacgcgtccgtttcaaacttcagagcgcaggcaaacaacttcttctctcagacatggcatctcaaggtttgtgtccttcgataaaaaatattcttcttttggactctgaagggaagcgtgtggcagtcaagtattactcagatgactggccaacaaacaatgcaaagttagcttttgagaagtttgtatttaccaagactgttaaaacaaatgctc

SEQ ID NO: 50881 - DNA, 422 bp, Glycine max
  Clone ID: LIB3167-001-Q1-K1-E11
tcgcccactcgtccgtccacgcgtacggaaccgtagataacgtcgcgtttggttgttaagttgttccgtttcagccatggtggagaacaatctcttcgaggatatctttagggtcgaaaaattaaaccccgatgacaaaaaattattcgataaagtcactcgcattgaagcaagaagtgaaaagtttgacatgtttatgcacctggacattaattctgaggtatatccattaaaggtgggtcagaagtttgctcttgtgcttgtttcatcgcttaatcctgatggaacaccagacactggctattatacccagatcaggcgacaatcactggccaacaattttgaatatgtcatgtatgggaagctctacaggataacagagggttcggggcgtgaaaaagcggagatgaatatttcatttg

SEQ ID NO: 50882 - DNA, 443 bp, Glycine max
  Clone ID: LIB3167-001-Q1-K1-E12
accaaagttccaaattttttggtttggggatagatagagtgatacgcgtcacattttcataataataaaaaaatggcagcggcggcggcagtgacggtgctactcccacctaggattccgaccaccaccaacgttacccgctgctctgctttgccttctctccctcctcgcgtctccaacaccaaaaccactttgttctcaccttccctcaacaacttttcagtgtcccgaaaatcttctctgcttcagaccagagcttcttcagaggaatcatcctcagtagatgccaatgaggtgttcacagatttgaaggaaaagtgggatgctcttgaaaacaagtccacagtacttctttatggtggaggggctatagttgctatttggctatcgtcaattcttgtgagcgccatcaactcagttcccttgcttccaaagattatgga

SEQ ID NO: 50883 - DNA, 411 bp, Glycine max
  Clone ID: LIB3167-001-Q1-K1-E2
ccaaaccgccatttccttggggtttatggagtgagcgtggaagaggaaagagcaagcagcaacagctcgtggcggttccgattatttattaagatcaatgttgcatgcaggatctgcccctagcttttgtttaagctatcccgggaaccttcattatcctccttcttcagttcaaaaaacatgtttttctgttcgttgttcggtttcacagacaaaaaatggagctaaagtggaatatactccttggctcattattggcttgggcaatcctggtaacaaataccatggcacaaggcacaatgttggatttgaaataattgatagcctttctcgagcagaagggattcagatgaacacaatacagtcaaaggccctcattggaataggttctattggtgaagtaccgatttt

SEQ ID NO: 50884 - DNA, 403 bp, Glycine max
  unsure at all n locations
  Clone ID: LIB3167-001-Q1-K1-E3
ggttcgtggggggtgccaacatctaagcagcaggcccattcaggggcggttcaatgaacccagctcgctcattcggcccagctgtggtcagtggagaanttcgctgctaactggatctattgggttggcccattgattggaggaggtttggctggcttgatttatggagacgtcttcattggttcatatgcggctgtcccagcctctgaaacctacccttgagcttcaacttgaaaaatatgacttcttgttctattcacttgtgtgtcctgtcccttcaagtttcatctttgttccccgtttgatgtctcgagcttcatggctttttgcatttttaactgtacctttatctattattcaccgcttgtaataattatgtaaattataattcgaacttgatgca

SEQ ID NO: 50885 - DNA, 389 bp, Glycine max
  unsure at all n locations
  Clone ID: LIB3167-001-Q1-K1-E4
atttgaaacatttacaaaaacactttcagagattgagaaaaaaatctcagaaaggaacaacaaccaagagcttaaaaaccgaactgggccagccaaatttccctacactgtgcttcttcctaccagtgaaccagggttgacttttaggggaatccctaatagtgtctctatctaaaggagtgtgtgtggcggcttcctttagtattgtacttgcatcttccaataaaatatgcatgcttatgagcatgcatcgttgtgtctgtgtttgttttaagttatgttatatgtattgctttagctttccattccactgtacgttaagccggaataaataagctcagtggcagatttcctgttaaaaaaaaaaaaanaaaaaaaaaaaaaaaaaa

SEQ ID NO: 50886 - DNA, 341 bp, Glycine max
  Clone ID: LIB3167-001-Q1-K1-E5
cccacgcgtccgcccacgcgtccgttccaaacttcagagcgcaggcaaacaacttcttctctcagacatggcatctcaaggtttgtgtccttcgataaaaaatattcttcttttggactctgaagggaagcgtggggcaatcaagtattactcagatgactggccaacaaacaatgcaaagttagcttttgagaagtttgtatttaccaagactgttaagacaaatgctcgtacagaagctgaggtgacactacttgagaacaatatcattatttaccaaattgtacaagacctgcatttttttgtcactggtggtgaagaataaaatgagctcattctag

SEQ ID NO: 50887 - DNA, 377 bp, Glycine max
  Clone ID: LIB3167-001-Q1-K1-E7
ataaaattcaggaaaaaaaaaaaaaaaacatggtggtgaaggtgtatggtccaacctatggatcccccaagagggtcctggtgtgtctgattgagaaggaaattgagtttgaaacagtgcatgttgatctcttcaagggagagaataaggaacctgagttccttaagctgcagccatttggatcccttcctgttattcaagacggtgattatactctctatgaatctcgtgcaataatcagatacttagctgagaagtataaagaccaagggactgacttattgggaaagacaatagaagaaaagggtctagtggaacaatggcttgaagtggaagctcataactttcacccaccactctacaacttggttattaat

SEQ ID NO: 50888 - DNA, 376 bp, Glycine max
  Clone ID: LIB3167-001-Q1-K1-E8
ggcaagaatacacttcccccaataataaataggccgatagttcaatctgaaagggcttcatacccatcaccaaaaccaaggacaaaagattgggataagttggaagctcaagtgaaaaaagaggagaaagaagaaaagcttgatggtgatgctgctttgaataaattgttccgtgatatttaccaaaatgcagatgaggacatgaggagagcaatgagcaagtctttcttggagtcaaatggaacagtgctatcaactgattggaaagaagtgggatcaaagaaggtggaaggcagtcccccagaaggtatggagttgaaaaaatgggagtattgattcggtacttaaatattcatttgagctgatgcttgcgaga

SEQ ID NO: 50889 - DNA, 277 bp, Glycine max
  Clone ID: LIB3167-001-Q1-K1-E9
ggcaagaatacacttcccccaataatttattagccgatagttcaatctgaaagggggggtacccatcaccaagaaccaaggacaaaagattgggataagttggaagctcaagtgaaaaaagaggagaaagaataaaagcttgatggtgatgctgctttgaataaattgttccgtgatatttaccaaaatgcagatgaggacatgaggagagcaatgagcaagactttcttggagtcaaatggaacagtgctattaactgattggaaagaagtgggat

SEQ ID NO: 50890 - DNA, 112 bp, Glycine max
  Clone ID: LIB3167-001-Q1-K1-F1
gggtggccatctcaatccttttttttttttttttacaatggcacgggttccttacaggaacgggccttccagggctttaaattctcccttttggactacaaattctggggct

SEQ ID NO: 50891 - DNA, 421 bp, Glycine max
  Clone ID: LIB3167-001-Q1-K1-F10
cccacgcgtccgcagaataatcagcattgttgaaaagtggaaccgttcataagaagctcgccaggtaggtcatacatttgatgcggggccaaatgctggtctaattgcacgcaacaagaaagctgctacctctttgattcagaggctgctttactactttcctgcaaattcagatgacctcagcagatacattattggggacaagtcaattgctaaagatgctgcgatcaatggaatacaggatgtagaagctttgccgccacctccagaaattaacgataatattccatcacaaaaatacaggggggatgtcagtgacttcatatgtaccagacctgcaaggagacctgttttgctttatgatagcattcaagcacttctgaacgatgaaactgggcttcccaagtaagttcatgggaaa

SEQ ID NO: 50892 - DNA, 320 bp, Glycine max
  Clone ID: LIB3167-001-Q1-K1-F11
acctgatggcattccattatcataagcctcagacaggatcaaagctggttccattcacttcatgatggataaatacgacacgaatccacctttgtatggtgaacttgccaaagggcagagccccacgttcatggcgatcgcttgctcagactcaacggcgcgcccatttgatgtgctagatttcccacccagacaggcctttgtggtcagaaatgttgcccacattgtcccaccatatgaccatgtcgaaatacgctcgaactggggcttcaactgaggatgctgttttgcatgataaggtgtctgcaaatgtggtcatt

SEQ ID NO: 50893 - DNA, 422 bp, Glycine max
  Clone ID: LIB3167-001-Q1-K1-F12
cccacgcgtccgcccacgcgtccggttggaacacttcaccccggggaactggggaaggatattttcttcttttttggtggttctagttgttaagggaagatattgtaaccatgaatgttgaagaagaggttcagcgtctcagccaagaaatcaagaggcttggtaaggtccaagcagatggttcttacaaggtaacatttggaacactatttaacgatgatgaatgcgcaaatatatttgaagcacttgttggaacactaagagcagcgaaaaagcgtaaagtactgacatacgagggtgagctactgctgcaaggagtccatgataatgtggaaatcactcttaatcctgcccctgctgaagcagccgcagcagctgccaactgatacaatggttacatgccacactgtatcctgtgcaac

SEQ ID NO: 50894 - DNA, 150 bp, Glycine max
  Clone ID: LIB3167-001-Q1-K1-F2
gtccgaacgagcttgttcccgaacataaggttttaactgaccccgaaaaaaaaaccttgcttgaaagataccccgtcaggaaactaagttacctaggattcaggtacagatccgtgcagaattatgatgaacggacaatgaagatatcgc

SEQ ID NO: 50895 - DNA, 131 bp, Glycine max
  Clone ID: LIB3167-001-Q1-K1-F3
agaatggttaaagggagaggggaaggaggctcggcagggaaggagaggggatcgattcctcagcagcaccagacatttatataagctctatcccgttcatcaaatcgcgcatactcttacaatcttttgtt

SEQ ID NO: 50896 - DNA, 293 bp, Glycine max
  Clone ID: LIB3167-001-Q1-K1-F4
aagctccccagaatcaccggaaaggaccttctcatgggaaacgaatgcgccgtctgcctggacgagatcggaacagagcaaccggttcgggtggttcccggttgcaaccacgccttccatttggaatgtgccgacacctggctctccaagcaccctctctgccctctctgcagagccaaactcgacccttcgcttttctcttcttcccaaaatccatgctgaccaacaagctctagcgcaaagttggtagatgcatgacccagtttcttaaatatttcttgactgtatatatg

SEQ ID NO: 50897 - DNA, 149 bp, Glycine max
  Clone ID: LIB3167-001-Q1-K1-F5
gtgatttaatgtttgtgaaatttaaatagggaaggggcttaattaaatgctgtgggatatcaattatcatcatatgatcatactaatagttttcatgtaacttgcttcctgcaacttgtatctaatgctatatccgcttttcttttatt

SEQ ID NO: 50898 - DNA, 430 bp, Glycine max
  Clone ID: LIB3167-001-Q1-K1-F6
ctcaaaccctaaccctaaccctatccctccccgtcacaaaagaaaaccctctttgtccgatcatcgtcgtcaagatgttcgaactccgtctcgtgcaaggctccctcctgaagaaggttttggaatccgtcaaggagctcgtgaacgacgcgaacttcgactgctcctccaccgggttctccctccaggccatggactccagccacgtcgccctcgtcgctctcctcctccgatccgagggcttcgagcactaccgctgcgaccgcaacatctccatgggcatgaacctcaacaacatggccaagatgcttaagtgtgctggtaatgacgacatcatcaccatcaaggccgacgacggcagcgacactgtcactttcatgttcgaaagccctacacaagacaagatttctgattttgaaatgaagctgat

SEQ ID NO: 50899 - DNA, 329 bp, Glycine max
  Clone ID: LIB3167-001-Q1-K1-F7
caactgctgatgcccctgggtccgaaaatgggacccctgaggcaggagataagcctgtgcaaatggatactgataccaaggttgaggctccaaagaaaaaagttaagaaaataaacattcctgtggtggagttagtttatggggcaatggcagctgcagatgtccagaaagctgtagagaaggagtttgaaatggctttgcaagatagagtgatggaggaaacaaaggataagaaaaatgcagtagaggcttatgtttatgacacgagaaacaagcttaatgacaaataccaagagtttgtcgttgattcagagagggaatcatttact

SEQ ID NO: 50900 - DNA, 381 bp, Glycine max
  unsure at all n locations
  Clone ID: LIB3167-001-Q1-K1-F8
ctcgaataagctaccttgctagtttccatcatcgtatctgttagtatttccaaatatacacattttctattttattcatagaaatctttaacttgagaagcattacatggcgctgacgatgatggcggcgatcggcatcggcatgaagcaagagaagaagatgccggcgacgccggcgccggagaacgagctgaagaagcggaacgcggagctcgagaaggagctcagagagagcaaggagagggaggagcagatgaagcgcgaactccanagcgcgtgggagaggctgcgcgtggccgaggaggctgaggagaggctctgctcccagctcggagagctagaagcagaggccgtttaccacgcgcgtgactaccacgcgcg

SEQ ID NO: 50901 - DNA, 273 bp, Glycine max
  Clone ID: LIB3167-001-Q1-K1-F9
gttatataatctatctcgctagttttcattatctcttttgccactatcatcagatacacgcagtcaaggtcgtagtgatatgccccactagctagagaagccactcatgtatctaactaaaatggacttgagcggagagggcctgaactatgatataattatgcgctccactccgctgccgcttaacgcactgctcaatcaggacacaaagctcgacattgaactcttatagcgcaatgacagggaggaacatataagctctacactcagatc

SEQ ID NO: 50902 - DNA, 79 bp, Glycine max
  Clone ID: LIB3167-001-Q1-K1-G1
ccttccgaaattggaaaaaaccatacacaataaggtggtttcactaacaagggtcaaatccaataaagaaggcacgggc

SEQ ID NO: 50903 - DNA, 158 bp, Glycine max
  Clone ID: LIB3167-001-Q1-K1-G10
cacacactgacggtgatctgatagtggaaccactcctatcggatgttaacagagagaatgatatccttatatagcgtgagagcgttgacatcagatccagcttcaactaatatgtttattgacagtatactgcgatgcatttttgcacttactatgac

SEQ ID NO: 50904 - DNA, 365 bp, Glycine max
  Clone ID: LIB3167-001-Q1-K1-G11
gtggagggagggagccgtagcagcggaagctctagcttgggtagcgaatcacaatggcgagaggattaaagaagcatctgaagaggcttaatgccccaaagcattggatgcttgacaaactgggtggagcatttgctcctaagccctcatctggaccacacaaatcgagggaatgcctgccactcatactcattttgcgaaaccggctgaagtatgctctaacataccgtgaagtcattgctattctgatgcagcgacatgtacttgttgatggcaaagtcaggactgacaaaacataccctgctggttttatggatgttgtatcaatccctaacacaaatgagaacttacgcctgctgtatgac

SEQ ID NO: 50905 - DNA, 429 bp, Glycine max
  Clone ID: LIB3167-001-Q1-K1-G12
tcgagataactagaaacagtgtgatgaaaatgaaggtccttgttttcttcgttgctacaattttggtagcatggcaatgccatgcgtacgatatgttccctctccgaatgaacactggctatggtgcccgtactccggaggtgaaatgcgcaagttggaggcttgctgtggaagcacacaacatctttggctttgagaccattcctgaagagtgcgttgaagcaacaaaggaatacatccatggcgaacaatatagatcagactccaaaacagttaaccaacaagcttacttttatgccagagacctcgaagtccatcccaaggacacatttgtgttcagtatagatggcaccgtactctctaatattccatactacaaaaaacatggatatggggtggagaaatttaactcgaccttgtatgatgaat

SEQ ID NO: 50906 - DNA, 99 bp, Glycine max
  Clone ID: LIB3167-001-Q1-K1-G2
ccaaacttcctttctttctttcttttccaatccgcccttaattcgcgtccctttcttcagcaaaaaccaaaacctgaaaaaggaaaagggtgtggaaat

SEQ ID NO: 50907 - DNA, 428 bp, Glycine max
  Clone ID: LIB3167-001-Q1-K1-G4
cccacgcgtccgaagaagcacaaagagaagcattagcactaggagcagcaacaactagtctcagctgaaatggcctcttcagtgatggcatctgtggccctcaaacctgcccctttcactgttgagaagtcctcagtgagaggccttccctctctctcaaggaactcttcttcattcagagttgtggccagtggcaagaagatcaagactgacaaaccttatggaattaatggtggcatggctttgagggatggaactgatgcatctggcaggaaaggaaagggaaagggtgtttaccagtttgtagacaaatacggtgctaatgtcgatggttacagtcctatctacgacaccaaggactggtctccaaccggtgatgtctacgctggcggtacgactggcttggctatctgggctgtgactctact

SEQ ID NO: 50908 - DNA, 385 bp, Glycine max
  Clone ID: LIB3167-001-Q1-K1-G5
atttcttttaataaaaaaaacttagaatcgaaacgaaaaatcgccatgaatcccaaaatcctcttcgtgtttgctctgcttctgaatctcgtatccaattcgttccaaaaccctaaccctaaaacccccaaatcaacgtcatcgcaggctcacgtggagctcatcaaccacggcttacccgccggtcttctccccgccaccaccgtcttgggctacgccgtgaaccgtacctccggtgactttaccgtcaagctcggcggcgcgtgcaagatcacgctcccgccggacaactacgtcgccacctattccgacaccatcacagggaagatcgtgaaggggaaaatcgctgaactcgaggggattagggttcgcgcgttcttcaagt

SEQ ID NO: 50909 - DNA, 430 bp, Glycine max
  Clone ID: LIB3167-001-Q1-K1-G6
cccacgcgtacggtcccccaccaccttcagcaccaccaccaaagaagccgtactactaccactcaccaccccctccttcacctgctccacctaagccatactactaccactcaccaccacccccaccaaagaaaaaaccatactattaccactccccaccaccttctcctaagaagccctacaagtacccatctcccccacctccagtgcacccttaccctgaccctcacccacacccacaccctcacccacaccctgaccctgaccctccctatgtctaccactctgctccaccacctcctaagaagccatactactaccattctgcaccacctgcagtccaccaccaccttacaagaagccttacatctatgcatcaccttcccctgcttaccactattagcataccttctatcgatatgaagaatat

SEQ ID NO: 50910 - DNA, 403 bp, Glycine max
  Clone ID: LIB3167-001-Q1-K1-G7
catccatccagcacgcgcacttcctttggagtctctgcctgaagatggcaagccttcagttaacaacaacacccttcactcttttgagacaacaaaggcagcaccccacaaagaagaagtccactgcttctcagctgaaccctcctcggccacgtcccctcagagtgagtgtgaggtcctataaagtggtgattgagcacgatggagagtccactgaggtggaggttgaacctgacgagaccattctgtcaaaggcattggactctggcttgtctgtgcctcatgattgcaagcttggagtctgcatgacatgccctgctcgcctcattagtggatctgttgatcagagtgatggaatgctaagtgatgatgtggtggagcgtggctatgcactcttgtgtgc

SEQ ID NO: 50911 - DNA, 421 bp, Glycine max
  Clone ID: LIB3167-001-Q1-K1-G8
caagtattaccgggtttccttgattctataattggaattcaacgaggtgaatcaaagtcttttcctcttgtatttcctgaaacatggaagcaagaaaatcttcgtggtgttcatgctcagtttactgttgaatgcaaagaacttttttacagagatttaccagagctgaatgattctattgctgataagcttcttcctgaatgcaccacagtggagcaggtcaaagacttattgttacagaaatgcctagaggtggagcaaacagctagagaacaagcaactgataatgctatcttagatcagatttctaagattgtagaagttgatatacctaaatccttgtttgaggaacaaggaaggcagctttatggagccaacctattagaaatacaggcaaaaatgaaactaaatgagcagcagc

SEQ ID NO: 50912 - DNA, 390 bp, Glycine max
  Clone ID: LIB3167-001-Q1-K1-G9
tggatattcatttctctacccttttggttggcaggaagtagtaattgaaggtcaagataaggtgttcaaagatgtcattgaaccactggagaatgtcagtgtaaatgtgataccaactggcaaacaggatattacagaatttgggtcccctcaagaggttgccgaaactctaataaaaaaggttttggcccctccaaaccagaaaaccaagatagtagaagcaaaagagctagatgttgaaagaaaaaaatactatcaatttgagttcattgctcaggctccgaactatactcgtcatgctctcagcacagtctccattggcaatggtaagttttacaccttgacgacaggagcaaacgaaagaagatggtgaagatgaaagacggctgc

SEQ ID NO: 50913 - DNA, 404 bp, Glycine max
  unsure at all n locations
  Clone ID: LIB3167-001-Q1-K1-H10
atgacatgttccttgaaggaaaaaaaacgcagttgaaagattgaagctcgagatgtcggggaaaggcgcaaagggtttgataactgctaagaacccttcttcctctaaggacaaagacaagaaaaaacccatttctcgctcctcaagagccggtcttcagttccctgttggacgcattcatcgtcttctgaagtcaagggtgacagcacatggaagagttggggcaacagctgcagtttattctgctgccatcctggagtatttaactgcagaggtgttggagttggccggcaatgcgagcaaagatctgaaggtgaagcgtattacccctagacatctacagctcgccatccggngagatgaagaacttgataccctcatcaaaagaacaatagctggtgggg

SEQ ID NO: 50914 - DNA, 369 bp, Glycine max
  Clone ID: LIB3167-001-Q1-K1-H11
agaaaaaagaaaatcgaagaggaagagcaaggacacaacacaaagaagcaaaagaagacatggcgttgcagtggctgattctcacttacgtggtcgcagctgaggctgccgtggccattctgctaacccttcccacgcccaaactcctaagggaccgtttcgcctctctcgtttccctcattcttcaacccgcgcttttcattgtcccctttgcggggttccaactccttgatatatactggaaaaatgagcatcggttgatgtgtacctctgaagtttgtactgctgcggagagagatcgatatgagaaatctatatacaaagctcagaggaatgtaatactgtgtgttacagcatgtgttctctact

SEQ ID NO: 50915 - DNA, 367 bp, Glycine max
  Clone ID: LIB3167-001-Q1-K1-H12
cccacgcgtccgcccacgcgtccgaagaaatgaagagtaccttgttcgccctctttctactttgtgccctcacctcttacctaccttcagccaccgctggtgatgtggtcgacactgatggtaatcctgttgaaaatggaggcacatactttgtgttgccaactataatattaaacggcggtggaatagaatatgccacatttggaaatgaaacttgccctgtcactgttgcgcaatctcgcgatcagttctgcaagggctttccgataaccatttcatccccagcccgaatccgtcacatcagcgaaggccttagtttgaacattgggttcactttcgcatccccgtgttcccccgcttctgagtg

SEQ ID NO: 50916 - DNA, 421 bp, Glycine max
  unsure at all n locations
  Clone ID: LIB3167-001-Q1-K1-H2
cgacaaaggacatggggggttccaattccagaatttaataatcttcagccaagagaacctctaatgaatgaagagactattgatcatatcaaatctatcatagcccaaaagggtagtgatgcatggtggtacatgacagtagaggatcttctcccaactaaatatcgtgataaggcagcagaatatgaaaagggaactgacactatggatgtatggtttgattcaagttcctactgggctgcagtcttgggaaaaagagattcccttaaatatcctgcagacttgtatctcgaaggaacagatcaacatcgagggtggtttcagaggtcattgctaacangtgtagctacaaaagggaaggctccatatttgagtgttttaacacatggatttgtattggatgagaaggcttanaatgagc

SEQ ID NO: 50917 - DNA, 251 bp, Glycine max
  Clone ID: LIB3167-001-Q1-K1-H3
ccgagatatcatcttcttatagccactcgaaaatgacccaaagaaccaggagggccgctattgttggaaaatacggcacccgatatggtgctagtttaatgacacacatcaagaggatggaagctagtcagcacagaccattcttctgcgagttctgtggaacgtatgctgatccgaggaaggctgtgggtatttgcggctgcaaagattgcagaaaagtgaaagctggatgtgcctacacaatgtacact

SEQ ID NO: 50918 - DNA, 420 bp, Glycine max
  Clone ID: LIB3167-001-Q1-K1-H4
gattagcatagctgcaacatttctttatgccatcctcactgatcgagtgctgcttgtaaaatttaataaagacaagcatggcctattttgcgagccatttctcaattcaacttggatattgccgcagaagtccccctttagttcttggaatgaacacaataccgaaacatatcagaccatgctagacaaggatagggctagcaattcaaagaagggtttaccatctgttctgtttattaatctacaattcagcttcgaaaaccctgagaaatattttcactgtgatcatagtcaagatcttctccggaagatccctatgttgattctgcggtctgatcaatactatgtcccatctatgttcatgaacccatttttcaacttggagattgccaacatgttcccagagagagacattatttt

SEQ ID NO: 50919 - DNA, 414 bp, Glycine max
  Clone ID: LIB3167-001-Q1-K1-H5
cccacgcgtccgaaacgtctaaagtaattgaattaggagagagggggtgcagccacactgacacaccaaactacaaatcctcctttgagacgcgtcactcccaaacaccgtttttgtgagtgagttcaaagcaaacaaatactaaaaccatataaggaaggaggaaggaacgaagctgaatctgaatctgaatcggaatcgctttgtctttgaaattcgcactctctctctctctctctctctctctctctctctctcgggtctctatattgagccacttcgaatccgtcgcctcagctgcagatcacatcgagtttcacccgaatgctctttctggactcgatttagatcgagttcttcataccctgatagtgtgggaggatatacatgaagaacgggataatggaatgcagt

SEQ ID NO: 50920 - DNA, 392 bp, Glycine max
  Clone ID: LIB3167-001-Q1-K1-H6
cccacgcgtccggcgcgggtgaggtagaacccttccactgtggtgactctgcgatgggtgcctacaagtatgtttcagagctatggcgcaagaagcagtctgatgtcatgcgcttcttgcagcgggtgaggtgctgggagtataggcagcaaccttccattgttcgtttgacaaggtctacccgccctgacaaggctcgtcgcttgggcttcaaggctaagcagggctatgtgatttaccgtgttcgtgttaggaggggtggccgaaagagaccagttcccaaaggtattgtttatgggaagcccacaaaccagggagttacccaactgaaatttcagcgaagcaagaggtcaattgccgaagagcgagctggacggaagctgggtggactt

SEQ ID NO: 50921 - DNA, 341 bp, Glycine max
  Clone ID: LIB3167-001-Q1-K1-H7
aacaaatcaaagccatggccacctccaacttctctattgttctctccgtctccctagccttctttttggtgctacttaccaaggcacactcgaccgataccgtttctttcaccttcaacaagttcaacccagtccaaccaaacattatgctccaaaaagatgctagtatttcatcctctggggtgttacaactcaccaaagttggcagcaacggcgtgcccacctcgggatctctcgggcgggccctttacgctgccccaatccagatttgggacagcgaaaccggcaaggtagccagctgggctacatcctttaaattcaacattttcgcacccaacaaa

SEQ ID NO: 50922 - DNA, 424 bp, Glycine max
  Clone ID: LIB3167-001-Q1-K1-H8
cccacgcgtccgggagaaaggccttggaaaacttcaggcgctagacttatgttagaagatggatcaatctggaaagcaaagtcatttggtgcttcaggaacccaagttggagaagttgtttttaatacatcattgactgggtatcaagaaattctaacagatcctagttatgctggtcagtttgtactgatgacaaatccacatattggtaacactggtgtaaattttgatgatgaggaatcaagacagtgcttccttgccggtctagtaattagaagtttgagtatcagtacctcaagctggagatgtgcagaaactctaggtgattacttagcagaaaggaacatcatgggaatttatgacgttgacacacgggctatcacgcgcagattacggcaaaaaggcagccttattggtgtgttga

SEQ ID NO: 50923 - DNA, 334 bp, Glycine max
  Clone ID: LIB3167-001-Q1-K1-H9
ttttaatgatttgatttgctttggctgttgttgctgttgttgttgttcatggtgttaagtgatagataacagaagggagagcagaacctagaaatcgcgttggttcgttggtttatgacttggagtgaaaccctaactaatattgaagatgagcattcggaggttgagtgccgaagaatcgcaaacactttactctctcctcagagcagagcaacgttcgctccatgagatcctctcccaattcaacgctgcaatcccttccacccgccatttcactctctcttcctatctcctcatcctattgcaggacaataaggtgctcagcaccactgag

SEQ ID NO: 50924 - DNA, 376 bp, Glycine max
  Clone ID: LIB3167-003-P1-K1-A1
cccacgcgtccggcagaacatattatcatttcctcttttttttttttttttttttttttggaggtttaacaaatggcaacaaccactgtgatcatgaccactctcccccaattcagtggtcttagacctcaattctcagctgcccctgtgaagaacttggttgctgtccaacaacctatgaggcccaaggggaagggtgctttgggagctcgatgtgactacattggttcatccactaatctgattatggtggcttctacaaccctgatgctgtttgctggaaggtttggattggctccatcagcaaacaggaaagccactgcagggctaaagctggaggtgagggacttaggcttgcaaactggtgaccctgctg

SEQ ID NO: 50925 - DNA, 350 bp, Glycine max
  Clone ID: LIB3167-003-P1-K1-A10
gcgcgtccgctcctcaaccctgaagggcgagacggagccaggaagaccgcgcgccttcgatgatcgacgaatatccgattctcgctgtcgccgccgccttcgcggaaggggcgaccgggatgaacggtctggaagaactccgcgtcaaggaaagcgaccgcctctcggccgtcgccaatggcctcaagctcaatggcgtggattgcgatgagggcgagacgtcgctcgtggagcgtggccgccctgacagcaaggggctcgtgaacgccttgggcgccggcgtcgccacccatatagatcaccggatcgccatgagctgtcttgtcatgggcctcgcgtccgaaaaccct

SEQ ID NO: 50926 - DNA, 377 bp, Glycine max
  Clone ID: LIB3167-003-P1-K1-A11
cccacgcgtccgatagcctcagtaatctgagagagaaacaaaaacaatgaaggtttccattgccaagttccactcccttcccctatgttttttccttctcttggccttcaacacaaaacccctcctagcagcagaaccagagccagtggttgataagcaagggaaccctttggagccaggagtagggtactacgtgtggccactttgggctgatgaaggaggcctcacactaggccaaacaaggaacaagacatgccctctttatgttatccgtgacccttcattcattggcaccccagtttcattcttagcaccaggccttgaccatgttccaacactcactgatctaaccattgatttccctgtggtgacagtgt

SEQ ID NO: 50927 - DNA, 189 bp, Glycine max
  Clone ID: LIB3167-003-P1-K1-A12
cccacgcgtccgcggacgcgtgggtggaaactagtagtgaaatttatatctcatgttcgttataccaatccaaaaaaaatggaccataatatcgttacattttttttggattggtataacgaagatgagatataatggaaactagtagtgaaatttattgtatctgcggacacgaagacggacgacgta

SEQ ID NO: 50928 - DNA, 472 bp, Glycine max
  unsure at all n locations
  Clone ID: LIB3167-003-P1-K1-A2
gtaccggaatcggcagtgtgtccgacgccagagcgtaccggccacgcccgtaccggttcggtctcatcaacttaagcgcacnntgtgtggaaccctaacaacaacacagaggccgatcattncatggcagcgtgcttcttcctaatggcaaggcnncaactcannagtccaccnnntcactaaaactcttgtagnnctcctcaagggcnnctctctgcctcttcaccaaactccacctcctnngccttctaagagnngcaatttagcttcaactcgttagggcccatctcaatctagaannaagccaacctatctaagtgattcaacccaatcaacgcgtgatctccttcattggaaagccttgaaaccccagttacatccagccccttgattgcatggtacttatcgaacctccccgcatacaggaccgcagtgagcccactactaagagggatcgaggtgggcctggccc

SEQ ID NO: 50929 - DNA, 382 bp, Glycine max
  Clone ID: LIB3167-003-P1-K1-A3
ccaaagacactattaagtttggtgtgtgtgctgatgtgttaggtttgatcaacgtgcaacttgggaagccaccaaagaccccatgctgcaacctcattgagggtctcgctgatcttgaagctgcagtgtgcctctgcactgctctcaaagctaatgtgttgggcatcaacctcaatgttccagtgaacttgagcttgctactcaactactgtggaaagggtgttcccaagggtttcgtctgctattaatgaataaacacttctataatgtgtagtttcctaatgtaaagtatgtctcaaggttctatttcgctatattcgttattcatcatcctttgtactttgtacttttgtattccgtatagccaacgaacatttcgttc

SEQ ID NO: 50930 - DNA, 102 bp, Glycine max
  Clone ID: LIB3167-003-P1-K1-A4
ctttttaacccaccctttggctttcttaattcacactgggaggcccccaatcaggcacgtcccgaacccttccatttttttggcttaaaaatcgtccttgga

SEQ ID NO: 50931 - DNA, 316 bp, Glycine max
  Clone ID: LIB3167-003-P1-K1-A5
cacttgcggtgtggggtgtactatttaatctttagagcaggtgaagtgagaaaaagggattgatacgtttagggatggtaggattacgaagactggcccacctttttgtgacagatgtttgcgaccgggtagggcggtgtaataaagctatacgcaatcaacagaaacaccatggctgaactttgctctggacaagattaatgctgagttggcatagacctctatggctttcaacaagcttttgctggagctgggtcaatggagatgacaccattcataggaaacttgaaagaccgatatggctgaaaagcgttgc

SEQ ID NO: 50932 - DNA, 381 bp, Glycine max
  Clone ID: LIB3167-003-P1-K1-A6
aacgcctcgaatccacacagttctactctacgctctaaaccctctctctctctcgctctcgatctatcatggctttgcccaatcagcaaaccgtggattaccctagtttcaaactcgtcatcgtcggtgacggcggtacaggaaagacaacgttcgtgaaaaggcatcttaccggtgaattcgagaaaaaatacgaaccgaccattggagtggaggttcacccattggatttcttcacaaactgcggaaagattcgcttctactgttgggatactgctggacaagagaagtttggtggcctcagagatggatattatatccatgggcaatgtgcgattataatgtttgatgttactgcccgtctaacatacaaaaatgtcc

SEQ ID NO: 50933 - DNA, 353 bp, Glycine max
  Clone ID: LIB3167-003-P1-K1-A7
cccacgcgtccggtttatcgtgaggagaatatgaagttgtttgttttctttgttgctgcagtagttttggtagcatggccatgccatggcgcaggctaccaaaggttccctctccgaatgaaaactggctatggtgagcgttcttcggaggtaaaatgcgcaagttttaggcttgctgtggaagcacacaacatccgagcctttaaaaccattcctgaagagtgcgttgaaccaacaaaggactacattaatggcgaacaatttagatcagactctaaaacagttaaccaacaagctttcttttatgctagtgaacgcgaagtccatcacaacgacatatttatattcggcat

SEQ ID NO: 50934 - DNA, 381 bp, Glycine max
  Clone ID: LIB3167-003-P1-K1-A8
cccacgcgtccgcttttctctgcgagcattttccgctatggccgaagaatttgtgaagggcactgttcatcaaaacggcgtcgctgtcatcaccctcgatcgccccaaagctctcaacgccatgaacctagatatggatgtaaagtataaaagttatcttgatgaatgggaatctgatccaagggtcaaatgcgtactggttgatagtagctcgcctcgtgccttttgcgctggtatggatattaaaggggttgttgctgaaatacaaaaggacaaaaacactcctttagtgcagaaggtcttcactgctgagtattctttgatatgcaaaatttctgattacaagaagccatacataagcttcatggatggaataactat

SEQ ID NO: 50935 - DNA, 380 bp, Glycine max
  Clone ID: LIB3167-003-P1-K1-A9
tctgattctctccatatattatcttataacccctctcacagaatgggaagggctggaggaactgactatggtgcatacacttatgagaatcttgagagagagccttactggccatcagagaagcttaagatttccatcactggtgctgggggttttatcgcgtcacacatagctcggcgcctcaagacagaggggcattacattattgcttctgattggaagaaaaatgagcacatgactgaggacatgttctgtgatgaattccatcttgttgatctcagggtcatgaataactgcctcaaggttacagagggggttgatcatgttttcaatcttgccgcagacatgggtgggatgggttttattcagtctaaccactc

SEQ ID NO: 50936 - DNA, 379 bp, Glycine max
  Clone ID: LIB3167-003-P1-K1-B10
cttccaacaaattatatttttcttacaaaaaaaatggcaggtgaggtggtgaagaaggaagagtctctcaacctgaaagtcactaacaagagccatgttcaatcagaggagaaaattggaagaaaagagtaccaattggtcacttttgatcttccctacttggccttttactacaaccagaagctcttgttttacaagggtgaagatttcgagggcatggtccaaaaactcaaagttggacttggagtggtgctgaaggagttccaccaacttgctggcaagttagggaaagatgaagagggggtgttcagagtggagtatgatgatgacatgcttggtgtggaggttgttgaagctgttgtagctgatgatgaaattg

SEQ ID NO: 50937 - DNA, 375 bp, Glycine max
  Clone ID: LIB3167-003-P1-K1-B11
atggattccttgcttggaattcgagttggagcacggtttcgtgtaccgtgagcacaacaggtcaccaggatactacgatggacgctactggaccatgtggaagctgcctatgtttggttgcactgatgcttctcaggtgttgaaggagcttcaagaggctaagactgcataccccaacggcttcatccgtatcatcggattcgacaacgttcgccaagtgcagtgcatcagcttcatcgcctacaagcccccaggcttctaagtgtgaaaaatttgcaaagcatttgtagccgccaccccactttgtttgtttgtacttaaactacattcccatttgtttttgctttttgagatttcatcatcctgtatttttgg

SEQ ID NO: 50938 - DNA, 377 bp, Glycine max
  Clone ID: LIB3167-003-P1-K1-B12
cccacgcgtccgctccaattagggtttttgtgatctgcagctacgatgggtaagggaacggggagtttcggtaagaggaggaacaagacccacaccctctgtgtgaggtgtggccgccgcagcttccacctccagaagagtcgttgctctgcgtgcgcttaccccgctgcgcgcaccaggaaatataactggagcgtgaaggccattaggagaaagaccaccggaactggaaggatgaggtacttgcgtaacgtgcctcgcagattcaagagcggcttcagagagggtaccgaagctgcacccaggaagagaggagctgctgcctctgcctaagctttgaatgaatgacagcaatttttgctgggtcagtgaattat

SEQ ID NO: 50939 - DNA, 373 bp, Glycine max
  unsure at all n locations
  Clone ID: LIB3167-003-P1-K1-B2
agtttggtataactttagccgaggtcaggaggagcactagctaagttcaaaattgcaaaatggctaggggactaaagaagcatttgaaaaggctcaatgctcctaagcattggatgcttgacanactgggtggtgcatttgcgcctaaaccctcatctggaccacacanatcgagggagtgcctccncctcattcttattctgcgaaaccggctgaagtatgctctgacataccgtgaagtcattgctattctgatgcagcgccatgttcttgttgatggcaaagtcaggactgacaagacttaccctgctggtttcatggatgttgtttcaatcccaaaaacaaatgagaacttccgcctgctctatgacac

SEQ ID NO: 50940 - DNA, 323 bp, Glycine max
  Clone ID: LIB3167-003-P1-K1-B3
ggaaacagcagcatcagaaggcatcatcaacaatcaacagccatagtagttgtgaattctgttggttgactcaagaggatgtgattaggttccttcttggttccattggggtcttcactccacttcctgctttgtctattgactctcttggcatcgttagctctgatgtgcttgccattgactactactcccctgcatcttctacagttggagccatctcaaagtcccttgcccagcaaacttctgttgccattgtggacagtgatggcactttcattggagagatatcacccttcactctcgcttgttgcgacgagacggtc

SEQ ID NO: 50941 - DNA, 343 bp, Glycine max
  unsure at all n locations
  Clone ID: LIB3167-003-P1-K1-B4
cccacgcgtccgcccacgcgtccgtgaaaatggcatcaaccttcattggcaactgtacctctattcaagaaatgttcaggagggtgagtgagcaattcacagctatgttccgcagaaaggccttcttgcattggtacactggagaaggtatggatgaaatggagtttactgaagctgagagcaacatgaatgaccttgtgtccgagtaccagcaataccaagatgcaactgctgatgatgagggctatgagtatgaagatgaggaagaacctcangaagatgaggtttaaaacaatagtagtgatttgcagggtgttcttgtttgtgttttgttgtgatactc

SEQ ID NO: 50942 - DNA, 373 bp, Glycine max
  Clone ID: LIB3167-003-P1-K1-B5
gaaacgtttcgaaattaattttttttttttaacatacttaaagagagagagagagagagagagagaggggagggttgcaaattccatgagagcagaagaggtgcctcttactcgtctcgtctttcaccgttacgagtgagttcgacccctcctctggctcttccttctcttctcttctcttctcttctcatatcaaagcaataaccctagaacatggaagagagcttcgttttccagtggagcgtcatcagatctctcttgtccatccttcagtggtgggcgttcaatgtcaccgtcatcatcgtcaacaagtggatcttccagaaattggatttcaagtttcccctatcagtttcctgtgtccactttatct

SEQ ID NO: 50943 - DNA, 378 bp, Glycine max
  Clone ID: LIB3167-003-P1-K1-B6
cgtggccgtatcttggctggaacatgtcacagtgctaagatgaacaggactattattggtaggaggaattatctccattttatcaagaagtaccagaggtacgagaaaaggcactccaacattcctgctcatatatcacctgctttccgtgtgaaggaaggagatcacgttattattggtcaatgcaggccactttctaagactgtgaggttcaatgtgttgaaagtgatcccagctggatcttctagcggtgcaaagaaggcttttactggaatgtgagctttgatttccagtttttattgaagataaatgttaccttattaattattatatctgatttcttttctggatgataacaaatatgaaaaccttgtcaat

SEQ ID NO: 50944 - DNA, 169 bp, Glycine max
  Clone ID: LIB3167-003-P1-K1-B7
ctggaaaaactctatcatttcacttgtgctttttttctccctttttctatcagatgagtatgaataacagaacctgaacaattatggtttcgtattgatggacatgtatgttcatctattgtaggaactccttatatttctagtatgaatgtaatgtagtgcttaatgt

SEQ ID NO: 50945 - DNA, 378 bp, Glycine max
  Clone ID: LIB3167-003-P1-K1-B8
cccacgcgtccgcccacgcgtccggtaagcagcggctaccctaacctcgtcttgctctctactaatttcagctatggccgacgaagctgtggttgttccagatcccacccagatcgatgtcaagctctttaaccgctggagcttcgaggatattgaggttactgacatttcactggctgattacattggagttgcggcatccaagcacgccacatatgttcctcacaccgccggaaggtactccgtgaagcggttcaggaaggcgcagtgccccattgttgagaggctcaccaactctctcatgatgcacggtagaaacaatggcaagaaactcttggctgttaggatcatcaagcatgctatggagattattcattt

SEQ ID NO: 50946 - DNA, 374 bp, Glycine max
  unsure at all n locations
  Clone ID: LIB3167-003-P1-K1-C1
cttctccccaattctcaaaccttacctagtattttcgtttctgaacccaattaatgaagcacacaaggaccataacatacctatacctcaatatcacaagtcttatggaggcagagcgagacaagtacaagatgatcaactntgaagaaaccgagttacgactcggcctgccactcagtggaaacgagacgctcaaaaacacttgcagcactgggaagagggttttttcggatactgccgtggatttgaagcttaacctttcctcaacctcaaacagtgcttcttctgacctggctaaagagaagaacatcactgctgctgcacctnctgctaacgacccagcaaagccacctgcaaaggcacaagtggtgggg

SEQ ID NO: 50947 - DNA, 364 bp, Glycine max
  Clone ID: LIB3167-003-P1-K1-C10
ctcagtggtaccctcacgacatcaataaagacgatcctcttgtcatggcccgtcaagaacaagaacgcttatcaaagcttgaaatgttgaagcggcgaggaaaaggaccacccaagaagggccaaggaaggcgtgctgccaaacgcaacaaataaattatactttcacctctctctttctctttggaattattttgtgggtactcttttgagttttacttttttttatcagaatgtaaactaatgcattttagagttgaaaccactagcctaatttggttgaggtctctgttctctatgtgcaattaaattttctgatattgattcagtctatcttggaagttggaatgcaaccacaaggttat

SEQ ID NO: 50948 - DNA, 370 bp, Glycine max
  Clone ID: LIB3167-003-P1-K1-C12
cttgcatagactatagattaagaaagctattgacattgattagctagctccaacaatgggttctagcagattatcattcattttagtacttgagctggcaacctatttatccatgatcattgactcaagggatgcagaggcacgtaccctgccaaaatcagccttattgcctatcaaagatgatatacctactgttgttactattgcactggtggcaccactgccaaatttgcctgatactcttcctacagtgcccgaactacctgcagtacctaaagtaccaaatgctgaagtaataagtaataacgccaaaataatctctagagtacctatgatctatccagtcactactacttattttgacacttgc

SEQ ID NO: 50949 - DNA, 382 bp, Glycine max
  Clone ID: LIB3167-003-P1-K1-C3
ctgtgaagaaactcaagttgtggtccaaatagaaaaggaagaaaaagacccatggccatgagcatcctcctcactattgctgcagctgctattgttcctcatccatccaaccatcagctccacccttaccttcatcctcatgccttgattttgaatacagcaactatggaacattcttaccaaccccggagccggagccggagccggaaccgcaaccacaagagattgccagcctaaactcatcgtatcagcaatatatggtatcagtttcggaacctgtttatggcattccagtcccggtaattcatgcatctcgaacagaaagatcagctggtcaatttggatgtctttttagctttggttcttatttgttccgctgctt

SEQ ID NO: 50950 - DNA, 387 bp, Glycine max
  Clone ID: LIB3167-003-P1-K1-C4
ctagtttatcgggaggggaaatatgaagttgttggttttctttgttgctgcaatagttttggtagcatggccatgccatggcccaggctaccaaaggttccctttccgaatgaaaactggctatggtgagcgttcttcggaggtaaaatgcgcaaagttttaggcttgctgtggaaagcacaacaacatcccgagccttttaaaaccattcctgaagagtgcgttgaaccaacaaaggactacattaatggcgaacaatttagatcagactctaaaacagttaaccaacaagctttcttttatgctagtgaacgcgaagtccatcacaacgacatatttatattcggcatagataacaccgtactctctaatatcccatactatgaa

SEQ ID NO: 50951 - DNA, 353 bp, Glycine max
  Clone ID: LIB3167-003-P1-K1-C5
ataatttccttttccatgccccttttaccctcttccatggcttcaatcccacaattctatcaaaactacacgttgaccactcacgatctttccgactaccctacccctcttctcaatggcggtggtggcagcaacgacatcgttaatgcgtcggttatggacaccaccaccgtgtggggtggtgggcaagatagcttgattaatattcctgtgctggatatgaacaatggtgcacttgatcatattgtgtcgcttgattgcgacaccatggcttgtgctgctaattggatgccatctttttctgagcagcttggggggttttcggatttggccatttcggactgcaaaatggg

SEQ ID NO: 50952 - DNA, 380 bp, Glycine max
  Clone ID: LIB3167-003-P1-K1-C6
aaaatgaaaacccaaagtgcttctctcctctgtctttttctctctcttgctatccttttggctagtggcactgctgcaagtgcaactccaagaagcgcagtgccaagccaccatgtttcaacattcaacagaagcctttttccttccacttttctctttggaattggttcttctgcttaccaggcagaaggagcagcaagtgtagatgggagaggaccaagcatatgggacacctacactagacagcatactgaaaagatttgggatcatagcaccggtgacatgggagctgatttttatcatcgatacaagggtgacataaaaatagcgaaagaaattgggctggactctttcagattctctatctcatggtcaagaat

SEQ ID NO: 50953 - DNA, 379 bp, Glycine max
  Clone ID: LIB3167-003-P1-K1-C7
cccacctcaacaacaagatggcttctcccctctccctggttggattattgagtggctcaaggctgtgaagttcattgattcaaagcatttcaatgtcccatttgggctgggagcagtggagcttgtggcaggtagggaaagtgccattgcccaaatcatcagaacagttaccaacaaagtctacaacatcacattctcagttggagatgccaaaaatgggtgccatggatcaatgatggttgaagcatttgccgccaaagataccttcaaagctcccttcaaatctgaagggaagggaacattcaagactgtaagcttcaagttcaaagcaattgcaccaagaactagactcactttctacagctccttctaccatacc

SEQ ID NO: 50954 - DNA, 378 bp, Glycine max
  Clone ID: LIB3167-003-P1-K1-C8
caactctcaaaaaattcccgaaccaatccccatcgttgaccgaccctctgcgcaaagaccacgtgtccttccccgcccgccgcgccgatcggactctcagcctcgcgccccctcctcgtgcggtggctcgtgaggtttccgacggagcattggcggcgatgaagaaggggttggagaaagatccgcgcgcgctgtggcggagatacgtggattggctgtaccagcacaaggaacttgggatttacttggatgtgagtcgggtcgggttcagcgatgagttcgttaaggaaatggagccctgtttcgaagcggcgtttcgggcgatggaggagttggagaaaggtgcgatcgcgaatcccgacgagggtcgcatggtgg

SEQ ID NO: 50955 - DNA, 381 bp, Glycine max
  Clone ID: LIB3167-003-P1-K1-C9
cccacgcgtccgcccacgcgtccggttactcagcatcacctccttttacactctcgaattcgcattctcttcactcattttccaatccatggccaagggagagaaaaaacctgcagagaagaagcccgcggcggagaaggctccggcggagaaaacaaaagccgagaagaagatcccgaaggacgcagcctccggcgagaagaagaagaagaggacgaagaagagcgtggagacgtacaagatctacatcttcaaggtgctgaagcaggttcaccctgacatcgggatctccagcaaggccatggggatcatgaacagcttcatcaacgacatcttcgagaagctcgctcaagaatcttccagactcgcgcgctacaacaa

SEQ ID NO: 50956 - DNA, 379 bp, Glycine max
  Clone ID: LIB3167-003-P1-K1-D1
cccacgcgtccggttgagaactaagaaggagaagcaaatggcttcctcaatgatctctgccccagctgttaccactgtcaaccgtgccggtgccggcatggttgctccattcactggcctcaagtccatggctggcttccccaccaggaagaccaacaatgacattacctccattgctagcaacggtggaagagtgcaatgcatgcaggtgtggccaccagttggcaagaagaagtttgagactctttcctacctgccagaccttgatgatgcacaattggcaaaggaagtagaataccttcttaggaagggatggattccttgcttggaattcgagttggagcacggtttcgtgtaccgtgagcacaacaggtcacca

SEQ ID NO: 50957 - DNA, 379 bp, Glycine max
  Clone ID: LIB3167-003-P1-K1-D11
gaagattccgcaacagagagtagaaaagatggcgcggttgatcacagtggtgtggtgcgcggtggcggtgctactgtgcgccgcggcgggcgcgtcgtgggtggaggaggcggcgaacccgatacgaatggtggcgggggtggaggcggaggtggttcgggtgatagggcagtgccggcgcgcgctgaagtttgctaggttcatgagcaggttcgggaagagttaccgaagcgaggaagagatgagggagaggtacgagatattctcgcaaaacctcaggttcatccgctcccacaacaagaaccgcttgccctacactctctctgttaatcattttgctgattggacttgggaggagttcaaaagacacagactaggc

SEQ ID NO: 50958 - DNA, 379 bp, Glycine max
  Clone ID: LIB3167-003-P1-K1-D12
attcttcatccatagacatggccaccgtcacttctgcagccgttgctattccctcattcactggcctcaaggcaagcgcaggcaaagtgagtgccgcagttaaagtctcagctccccaagccacaaggttgggcatcaaggcttcgctgaaagacgttggagtcgctgttgtggccactgccgcgagtgcagtgctggctagcaacgccatggccattgaagtgttgctgggtggtgatgacgggtctctggctttcgttcccaacaatttctccgtggcctctggggagaagatcgtgttcaagaacaacgcaggtttcccccacaacgttgtgttcgacgaggacgagattcctagcggcgtggatgcaaggaaaat

SEQ ID NO: 50959 - DNA, 382 bp, Glycine max
  unsure at all n locations
  Clone ID: LIB3167-003-P1-K1-D2
atccgttccaaaccacataagctttaacatagatggatgtagaaaagttgaagaagagggccagttctgttcgaactggtggaaagggtactatgagaaggaagaagaaagctgtccacaagactactactacagatgacanaaggcttcaaagcaccctgaagaggataggagtgaatgctatccctgcaattgaagaagtcaacatctttaaggatgaaatagttatccagtttttaaaccccaaagtacaagcatctattgctgccaacacttgngttgttagtggttcaccacanacaaagaagttgcaggatattctccccaacatcatccaccaattagggccagataacttagaaaacctgaaagagctagctga

SEQ ID NO: 50960 - DNA, 373 bp, Glycine max
  Clone ID: LIB3167-003-P1-K1-D4
cccacgcgtccgcccacgcgtccgggaaggaaagcctgaaaaccaaaaccatgcaatagttttcactcgtggtgaagctgttcaaactattgacatgaatcaggacaattatcttgaagaagcaatgaaaatgaggaatcttctggaggagttccatgcgaatcatggccttcgccctccaagcattcttggagtgagggagcatgtttttacaggaagtgtctcttccttggcttggttcatgtcaaatcaagaaactagctttgtaaccttggcccaacgagttttagcaaatcctctcaaagttcgcatgcactatggacacccagatgtatttgaccgaatatttcacataactcgaggaggcattagt

SEQ ID NO: 50961 - DNA, 384 bp, Glycine max
  Clone ID: LIB3167-003-P1-K1-D6
ggagagtgagagaaaagagaagagatgatgacaacacgcttcaagaagaacaggaagaagaggggccacgtcagcgctggccacggtcgaatcggaaagcacaggaagcaccctggaggacgcggtaacgccggaggcatgcaccaccacaggatcctcttcgacaaataccaccctgggttcttcggcaaggtaggaatgcgctattttcacaagcttcgcaacaaattctactctccgatcctcaacatcgacaagctgtggtccctggtcccgcaagaagtgaaggacaaggccttcaaggagaacaaggcgccgctcatcgacgtcacgcagttcgggtactttaaggttctcggaaagggcgttttgccgcagaaccag

SEQ ID NO: 50962 - DNA, 232 bp, Glycine max
  Clone ID: LIB3167-003-P1-K1-D7
atggtttcttcattcacttgcctcaaatccatggctggctttcccaccaggaagaccaacaatgacattacctccattgcttgcaaccgtctaagagtgcaatgcattcatgtgtctccaccaattgtcaagaagaaatttgatactttttcctacctgccatacctttattattcacaattgtctaacgaagtataataccttcttacgaagggattgattcctttctttg

SEQ ID NO: 50963 - DNA, 372 bp, Glycine max
  Clone ID: LIB3167-003-P1-K1-D9
cccacgcgtccggtcctattgtttcattgacttgtggggaggagtatgatcttaagactagaaattggcggaaaatagagggtatgtacccatatgttaatggggctgctcaggcacctccacttgtggcagttgtggataaccagttgtatgccgttgagcatctaaccaacatggtgaataaatatgacaaggaaaggaacacctggagtgaattgggaagacttccagtacgggctgattcttctaatggatggggcctggctttcaaggcttgtggggagaaacttctggttgtgagtggacaaaggggtccagaaggtgaagctgttgtgctgaattcatggcgtcctaggacagggttcaggaatg

SEQ ID NO: 50964 - DNA, 378 bp, Glycine max
  Clone ID: LIB3167-003-P1-K1-E1
tttcttttctctctcacacgaaaccctctccctccctttccctcagatttctcacttccttttctcctttccatttctcaccttctccccctctcttcatctcttctctaccccttttttggttttccttactcttacgaatcaaaacccgcaactttggacgtcgttggagggctttcgtcgctacccaccataactgacgaggggtgaccactggtagcaaggtgtattaggtccaattcatagtacctgaaagcacactttactcaaattgggaggaggtgttagtaggcatgatcggtccaggggctgtagaaatattagtgaaagatttgaaagtctttgacacatttaatacttggttgcattatgaatatg

SEQ ID NO: 50965 - DNA, 380 bp, Glycine max
  Clone ID: LIB3167-003-P1-K1-E10
cccactcgtccgcccacgcgtttttttaaaaaaaaaaaaaaaaaaaaaaaaaaggggaaaataaaaaaaaaaaaaaaaaaaaaaaaaaaaaaaaaaaaaaaaaaaaaaaaaaaaaaaaaaaaaaaaaaaaaaaaaaaaaaaaaaaaaaaaaaaaaaaaggggcgccctttttaaaggatcaaattttacttacccttccttccaactttttaatttttttttagtgcccctaaaataaaattaactgcccgcctttttaaaacttttgaattggaaaaaccttggctttcccaaatttattccctttgaaaaaaatcccctttttgccagttggcttaataacaaaaaggccctaaccaatcgcctttctaaaaattttc

SEQ ID NO: 50966 - DNA, 379 bp, Glycine max
  Clone ID: LIB3167-003-P1-K1-E11
ctaagctctagagagaggagaaaaaaaagggaaaagagaacacccttatttccatttctaaaagagttcattgaagaaatgaagatggatagtgcttccatgacaggctcaaagaggaggatatcatccaacagaggaattggaggagtcctcagagagcaaagggcaaggctatacattataagaagatgtgttgtcatgctcctctgttggcatgactagttttttcaagacttgaagaagttccacaagcagcatggcaatggaagaaaagttcttctttctatgtttcttttcttttattccttgtttatttttttcctctttttctcttccttttttctttctttgctctctccctctgattcatggtggagtg

SEQ ID NO: 50967 - DNA, 377 bp, Glycine max
  Clone ID: LIB3167-003-P1-K1-E12
cacaaataaagcacctgccgtggctattgatgtgttgcgccgcacaattgtagttgtagagagttctctaacaagtggggcttcctatgttgtctacttatatggctcagccaaggagctccttcccgcaggaattagggatacagtcaatgtatatgaagataaagcaacagaaatcttgaggcctgttgggtcagcaactcaaaggatatacatggctgtctattcattggagaagagtcttggcttggatccaaatgacccaatcattccatttgttgttcttgtaggctcttcagccacattatgggccttttattggttgtggacatatggaggttactcaggaaatttgtcccctaaatcagctttcgagc

SEQ ID NO: 50968 - DNA, 379 bp, Glycine max
  Clone ID: LIB3167-003-P1-K1-E2
cccacgcgtccgaaagtgcaatgcatgcatttgtggccaccagttggcaagaagaagttggagactctttcctacctgccaaaccttgatgatgcacaattggcaaaggaagtagaataccttcttaggaagggatggattccttgttgggaattcgagttggagcacggtttcgtgtaccgtgagcacaacaggtcaccaggatactacgatggacgctactggaccatgtggaagctgcctatgtttggttgcactgatgcttctcaggtgttgaaggagcttcaagaggctaagactgcataccccaacggcttcatccgtatcatcggattcgacaacgttcgccaagtgcagtgcatcagcttcatcgcctaca

SEQ ID NO: 50969 - DNA, 379 bp, Glycine max
  unsure at all n locations
  Clone ID: LIB3167-003-P1-K1-E3
gcaaaacactgaatgaggttgaggttgatattcaaacgccattgaaccaacaccttttactcaaacagagccgttaaccaaatgccacaatggcaacggcgccgttaactctccatctctgttgcctgggccgaagcttatgcaaaacgctctttcttactccctcccccgccgctcttgggagctctcctcacgtcactttccgaggcaagttccgccgccgaatctctttgtcccggcgcttcttcgncggctccaccttccgagaagtggaatatgaattgngctttggaggaggagtggatgagaagtatgatgtgattgtagttggaggagggcacgcanggtgcgaagccgctcttgcctctgcacgtttggg

SEQ ID NO: 50970 - DNA, 379 bp, Glycine max
  Clone ID: LIB3167-003-P1-K1-E4
caaagttccaaattttttggttgggggatagatagagtgatacgcgtcacattttcataataataaaaaaatggcagcggcggcggcagtgacggtgctactcccacctaggattccgaccaccaccaacgttacccgctgctctgctttgccttctctccctcctcgcgtctccaacaccaaaaccactttgttctcaccttccctcaacaacttttcagtgtcccgaaaatcttctctgcttcagaccagagcttcttcagaggaatcatcctcagtagatgccaatgaggtgttcacagatttgaaggaaaagtgggatgctcttgaaaacaagtccacagtacttctttatggtggaggggctatagttgctatt

SEQ ID NO: 50971 - DNA, 186 bp, Glycine max
  Clone ID: LIB3167-003-P1-K1-E5
gtccgccacccttccgcccacccttccgtttacttccattaataaaggtaccataggcgccgattttattccaggaatggaaaattcacctggatttggtgtttccacctctcatgccattttctacattctgcccctcattgttttccttatctgcgctacatagcaaaagacaaggccatacat

SEQ ID NO: 50972 - DNA, 380 bp, Glycine max
  Clone ID: LIB3167-003-P1-K1-E6
cccacgcgtccgcgcattcacaaataaggttgaagaggtcactgccggaagaagggagcaacaccatctttcattttccggcgatctcttgtttcttccatcatcaccgttttccggcgatccctaatcctcgcaaacagaaatggtacttcagtttctaacgcctctgcttcgttgactttcacactcgagatttacatctaacagtttctctttctctgtctttgcgttgccgacattggttttatttcttattttcttatttgtgatgtctgatttgtcgcgtttcaaattttcgtgaaagaaattagaatttgaattctctcaattgctcaattctctttggatttctacaattgggatcgggatgttgtgaaaat

SEQ ID NO: 50973 - DNA, 287 bp, Glycine max
  unsure at all n locations
  Clone ID: LIB3167-003-P1-K1-E7
gaaagccccgggcgacccacacgtccgtccacaactaagaatgatcgtttatttttaacccaagaccacaaagnccgcgtccgcttctttcaaagccgggctggacttccccatcngccttnacgttcgctacctcaaggccgttctctatcctcatcgcactaattccaactcccctctttacctatctgctgatctccaataccttcctcctaacgtttcggaccttgcctgcaaccctgctacggacaacaataagaccaggatcgttcctaggcacatccaac

SEQ ID NO: 50974 - DNA, 376 bp, Glycine max
  Clone ID: LIB3167-003-P1-K1-E8
gccacaacgaagaagggtggaagagggaaacccaagaccacaaagtccgtttcccgttcctccaaagccggccttcagttccccgtcggccgcgtcgctcgctacctcaaggccggtcgctatgcccagcgcgttggttccggttcccctgtttacctatctgcggttctcgaataccttgccgctgaggttttggagcttgccggcaacgctgcgagggacaacaagaagacgaggatcgttcctaggcacattcaacttgcggtgaggaacgatgaggagttgagcaagctgatggggtctgtgaccattgccaatggtggtgttctgcctaacattcaccagaatttgttgcccaagaaggccgctggcaagg

SEQ ID NO: 50975 - DNA, 376 bp, Glycine max
  Clone ID: LIB3167-003-P1-K1-E9
gaagaagaacagatcagaaaaatggcgtccaaagttccaaagaaggccaatctcctggatcaccactccatcaagcacatccttgacgagtctgtctccgaggtcgtaacgagtcgtgggtatgtggaagacgtgagattgagcaatgcgaggcttttcattggggcaatcatcatcgtcattgctttattcgctcaattctacaagaagaagttccccgaaaatagggattttctcatcgcttgcatcgccttatatcctgtccctacattttattttatttatttgtgtttggttgttttaattttggtttgcatgagataattggatgtggaaacatctaaaattaaggttgtttggaaatgggaatttctgg

SEQ ID NO: 50976 - DNA, 377 bp, Glycine max
  Clone ID: LIB3167-003-P1-K1-F1
cccacgcgtccggaatttcacattttatcttttgcattgagcaactaactcactcgcgccatggctgctaccatcatcaccacatgcaagctctcactgcttttgagtcttctctcagtttcacttttgctgggtgtgaggtctgatacccttcagaatgtaggcgcaattccccccacatgcaagcgcatagagtgtcccagctatgatgtcattcacgtaggcaacggctacgaaatccgtcgctataattcacccgtttggatttcaaacagccccattcaggacatttctctcgttgaagccacaagaaccggcttcaggaggttatttgactatattcaaggtaagaataactacaagcagaagattgagat

SEQ ID NO: 50977 - DNA, 370 bp, Glycine max
  Clone ID: LIB3167-003-P1-K1-F10
cccacgcgtccgctcgcaagcaaaaagaaagaatcccaggcgaggagaaagatggaggggaaggagcaggatgtgtcgttgggagcgaacaagttccccgagagacagccaattgggacggcggcgcagagccaagacgacggcaaggactaccaggagccggcgccggcgccgctggttgacccgacggagtttacgtcatggtcgttttacagagcagggatagcagagtttgtggccacttttctgtttctctacatcactgtcttaaccgttatgggagtcgccggggctaagtctaagtgtagtaccgttgggattcaaggaatcgcttgggccttcggtggcatgatcttcgccctcgtttact

SEQ ID NO: 50978 - DNA, 66 bp, Glycine max
  Clone ID: LIB3167-003-P1-K1-F11
aaaaaaaaaaaaaaaaaaaaaaaaaaaaaaaaaaaaaaaaaaaaaaaaaaagaaaggaaaaaaaaa

SEQ ID NO: 50979 - DNA, 283 bp, Glycine max
  Clone ID: LIB3167-003-P1-K1-F12
gggacgggggtcaactggatttattaataatcgcagcgcgaattggaggaggagccctacaaaccggccggcagggcctaagagcattcaccgacacgtaaagggtttggctggttcattaaccttatattggttcgccgtcagctcggatgctaaaaggtacacacgcctgcccctgcggctattcgctcatcgcatgcttcgcctttcgcgcgctcgcgcccacattcgcggcatcaccccgcgcacttcgcccttcgcggcggaacataccttctcggga

SEQ ID NO: 50980 - DNA, 148 bp, Glycine max
  Clone ID: LIB3167-003-P1-K1-F2
cccacccttccgcgaccccttggccccaagcgccgcccttttttttttttttttgtttgaaggaaatcataatccatatatctcctttaacataattccggggctgaatgggaccttcctggtttaactggtataaggaaaaggaggg

SEQ ID NO: 50981 - DNA, 273 bp, Glycine max
  Clone ID: LIB3167-003-P1-K1-F4
gtcttgttcaacaccaaacatatctgtcgctctctgctctgcttatggatccaagttgcaacccaccacttatcgttctcatgcatcaagggaaaacgaggcctattttctgtggaaatattgaatatgaagcccgccagtcagagctggagcggctttttagccgatatatgaaggtcgataggatggatatgaagtctgagtgcgcttttatatatatggcagactagagaaatgcttacgctgctatatgcgctactgatccatagaatt

SEQ ID NO: 50982 - DNA, 382 bp, Glycine max
  Clone ID: LIB3167-003-P1-K1-F5
atcgaaaattgctgaactgctaatggaaaagctgcctgggacatgctccaagatgttcattagagaacgtgttgtgcatgcatgggaccaactcatgtgaactggaaattcgaccaatatctctacacacgcatcttctgccgagaaggataatgattctatatctagagcatcatctcgctctaggcgtcataggcgacgcagagagaattccaatcctgatggaaatcctttggacgatttgaaaactccagttgcagtaaatgctggttcaccccctaattctgaggatatgccaacagtgaattccagtattcggttatctgatagtacagctcccaaagcttttaaagataagtgttttacttgagatcctggggct

SEQ ID NO: 50983 - DNA, 386 bp, Glycine max
  Clone ID: LIB3167-003-P1-K1-F6
cccacgcgtccggttgaatgattcgctaaattgagttctggcaacgtgaagcccggagaagaagccctgctaaaggagaatgtccgtgttcctgtccctgtaatttcagaaccaaagcagcaggcggctggaagtgactgcaagggaattgagcagattcctttgtctggggaaaatgaaaaggatgcgctagttcatataactgctacgtgggtccataatttctggtggcacggccttgcatgatgcttttgaggatggcactgatgctcctcctcagcatttatcagctctttagttgatacagattctcgcttagaagatgccttagcctgggctttcacgaatacggccgtggcatccactgtgattcataccgatcaaag

SEQ ID NO: 50984 - DNA, 334 bp, Glycine max
  Clone ID: LIB3167-003-P1-K1-F7
aaaaatctcaaatttttttttatacaccgagcaacacactcactcgcgccattatttcaaacatcatcaccacatccaatcactaacttattttaactctactctcaattacactttttccacatgtaacgtctgatacccttcataatgtatccacaattccacccacattcaatcccatacagtatcccaactataatgtcattcacataagcaacggctaccaaatccatcactataattcacccctttcaattacaaacagccccaatcaagaaatttctctcgtttaaaccacaagaacccacttcaagaggttattttactatattca

SEQ ID NO: 50985 - DNA, 376 bp, Glycine max
  Clone ID: LIB3167-003-P1-K1-F8
gtgtttagttggtcatctgtggatggcatattgcattccaaactcaccatcactgccagggttggaagacaggtccatgttgtttattcggctggaacataggcaagaatagagttaatggcaaacctcagattaagtaccatgatattgatcttacattcccaacttctctggtcgacaaaacatttttgagagggaaggagctcaaatgctgctatagggctacaattgatggattcagtgcaaccaatttccacgaatgttgtgacttcaagggcccatgtgtgataatcggctatacaaacaagtctttcaagtttggtgcatttaaccctgaagggtatagaagcacagatgactactacgacacatttga

SEQ ID NO: 50986 - DNA, 145 bp, Glycine max
  Clone ID: LIB3167-003-P1-K1-F9
ctagttgtctcctttgttctgtactcaattcttattttctgtaaccacatatgtggaactttttcttgtactcttactcccatgattaatatattcttcttatgatgttgcatatatgatgctagtatatgcaccttccattgtc

SEQ ID NO: 50987 - DNA, 380 bp, Glycine max
  Clone ID: LIB3167-003-P1-K1-G1
cccacgcgtccgcttccatacatttgctgtatggtctgagagctgctctggatctgatgttggaggaaggactcgaaaatgtgatcgcagggcaaagtcgtttaggcaaagcaaccagacttgctgtagaggcatggggtttgaagaattgcacccaaaaggaagagtggtacagtgacactgtgactgctgttcttgttcctgcttacattgatagtacttgaaatagttaggagggcatggaagagatacaatttgagcttaggtcttggactgaacaaagttgctgggagggttttcagaattggacatcttggccacttgaatgagttgcaactgttgggatgtctagctggtgtagagatgatactcaaagatgt

SEQ ID NO: 50988 - DNA, 245 bp, Glycine max
  Clone ID: LIB3167-003-P1-K1-G10
acgagattgatttgcttactcacgaagaagaattttccttgcctcagagttactttgtcaaggaagaaccctgagcaacaatttttggagtatatacattttttgtttcaatcgttattcatcttttgatgtgtacagctggtgttctcatcgcttgtctgtcaagtttcaccggtggttccggttggtactctcaatcataatgtatttagctacactggttcggatataatgcattttgactt

SEQ ID NO: 50989 - DNA, 385 bp, Glycine max
  Clone ID: LIB3167-003-P1-K1-G11
aaaatatagaacacactaccctcaacatagtaaagcagctggtgcaagtgaagcaatggctcaaaccatgttgctcatgtctagtgtctctagcagttattccgtggatttgaagaaagaccttttcctccaattgcagagtcaaagtttaaggcctaagttctctcaactctcattcaacccacttccaccatcaacttcttccttttcttcaccccgtacattcacaaccctggctctcttcaaatctaagacaaaagccgctcctgctaagactaaggttacaaagccaaagcaaaaggttgaagatggtatctttggcacttctggaggatttggttttactaagcagaacgagctctttgtgggtcgtgttgctatgctt

SEQ ID NO: 50990 - DNA, 198 bp, Glycine max
  Clone ID: LIB3167-003-P1-K1-G2
gcttggtgcaaccattggcatccacaccggttttgcgtttacagggtgcccaattacaacaaagttccattcaaaggtttaaaattttttccaacccaatgccccttaaaaaggcctggagggaccagatttttttggcttaaaatcaatttatggggggccttttcttaccaatcttgaagatttttcttttttgga

SEQ ID NO: 50991 - DNA, 426 bp, Glycine max
  Clone ID: LIB3167-003-P1-K1-G3
aaaaattaaaaacaaatataaatatatacaaaaaaaaaaaaaatttaacgggagccttatataaaaaaattcgcccctccttctcttctttttccttccttctacccttttttttcttttctttctctctttcttcttttttttctttcttcttttcctttcctcttttccttttttgtattttctttctctttcttcctcttttctttttttttttttcttcccccctcctttttctttttttcctcctctcttttcccttccctctcttttttttctcctcctttctttcttctcttttattttccttctccccctctatctttctctctctttttatccctttctctctcctttattcctcccccttcttttcattcttcttttttatacttctcttccccccttattcttttccctttcttt

SEQ ID NO: 50992 - DNA, 386 bp, Glycine max
  Clone ID: LIB3167-003-P1-K1-G4
cccacgcgtccgtagaacatgagcatataaatggataccctttatattatctatctttatattatctataaagggtaaagatatccgatgtgaatctatttgtttagttttctatcggtatgtatataggtgaataatccaacatgcctttttgtgaagtaaaaaaactaccctcgatccatgcctcaaaagggttgataataagtaaaaaaaatcaatgaattcatgataaaacccttctgcgtttttttattataaatttttttgtcaataaagggatcaaggggttgggggatcaaatggtaaagttcttttgttggtaaattggaggattagaaacatgactattgctttccaattagctgtttttgcattaattgctattt

SEQ ID NO: 50993 - DNA, 388 bp, Glycine max
  Clone ID: LIB3167-003-P1-K1-G5
aaaggactaagatgggttcagtttctctgaaaataggagatggaacagccagattccaaagagcaacactgtgttcttcagctgttaacattctcatgatattctctgtcatcaccaccaacctctttgctctctatgccttcaccgcttccccaaatcaaccccaacactctctccttcaccacaacaatgcccacaaaaacatctctctcatctctgaacaagtctcactcatcctcagagagatcgatttatcccaaaagaaacttgcccagatggagaaagagcttcttggatacgaaagcattgatctttcgagacccaacattgcatccgagctcaaactcttcctccagaggcaccagctccctctggggaaagactcaag

SEQ ID NO: 50994 - DNA, 370 bp, Glycine max
  Clone ID: LIB3167-003-P1-K1-G6
cccacgcgtccgcgagtgtcgtttccttcccttccctaacgatctgaggaagacaccaagcttctctccacgcccttcttgggtaatctgaagtgcagcgatggcggatggattgcactcgcggcatccatcagtagttcagaagttatctggacagacttatttgttggctaggcttgcccctactcactcaagaaactattccacaactggtagttacttcaatggaggcttgcagtcttcgggtttggttccagtcatggcacatgcaccggctgagaaaggagtgtctggatttttgttggatttcatgatgggaggagtgtcagctgctgtgtccaagaccgctgcggctccaatcgagcgaggt

SEQ ID NO: 50995 - DNA, 256 bp, Glycine max
  Clone ID: LIB3167-003-P1-K1-G7
ctttgtacgaacactatattggaaagtaattcatatacgatatagaccacatcggagaagctatgcacagaccaggatttagggtagaggggtgttgcttctgataatcacatcgtaaaagttgtttcttcagtttgctgagcttggttatggctctatagagaaatgtaggctacaattctcgataataagtgagaggtggtacgtcttgttcattcttgtaactatgtggtctttccccattaccttaattcct

SEQ ID NO: 50996 - DNA, 370 bp, Glycine max
  Clone ID: LIB3167-003-P1-K1-G9
cccacgcgtccgcgcaagtattcctttcgtcttaccttcgacgactcaaccgatgtacaagaatttgacactacaaaaaattcagatttaccattctttgaacttagctccatagctgctgcaacagacaatttctctgatgctaacaagcttggccaaggaggttttggttctgtttataagggtctattgattaatggaatggagatagcagtgaagagactgtcaaagtactctggacaaggcatagaagagtttaaaaatgaggttgttttgatctcaaagctccaacacagaaatcttgtgaggatcctaggttgctgcattcaaggagaggagaagatgctaatctatgagtatttgccaaaca

SEQ ID NO: 50997 - DNA, 341 bp, Glycine max
  unsure at all n locations
  Clone ID: LIB3167-003-P1-K1-H1
atttgatctgatgtatgccaagagttctctttgntcactggtatgtnggtgagggtatcgaagattttagttctctgaagctcgtgaggatcttgctgctcttgagaaggactatgaggaggttggggctgaaggagcggaagatgatgaggaaggagaggactattcataaatgaaggttttattatcaatgtaattgtttcgagtaaaaagggtatatgcttcgttacattaccctgaaccagtattgttcgttcctttttgttttactcctgtgtgatatagttctccattattcaaactgtgaagtgatatcatcattatgcttctattttggtggt

SEQ ID NO: 50998 - DNA, 364 bp, Glycine max
  Clone ID: LIB3167-003-P1-K1-H10
gttttatgccaatgtacttatcctgtgaggcgaactgagatgattggctctggggacatcaatttgagcatacaaatccttcctgtgttagaaacatatttgctctaacgttcctatcaaccagaaccatttgggaaatgatccagcccatcctgtttcccattggcataaaactcaactattgccttcatccttgcaaacttatcaagatggtaattaacatgtacgatcactggcttcagcttcttgagtttagcatctatttttacacgcttaaagagaaccttactgttcataaaaaggtacatatacatcgtcctttttgcagcgtgaagttcatcataaccaaccacgcgtacctcca

SEQ ID NO: 50999 - DNA, 370 bp, Glycine max
  Clone ID: LIB3167-003-P1-K1-H11
cccacgcgtccgcccacgcgtccgcccacgcgtccgagttcttctcccgatggaactttcctcaaagaaagagttactatctcgaatagtatcaacactaacgcccaccatcacactcatcttcttcttccttgtgctttctccgagcctgtgcacatcactcggaagcaccaacacagttggatcggagttgctgaaggttgctccttctgaatttgaggggacagtgagaaccgtcgttgatgtgttgcaagaagtcacctctattctctccgagttcggttctggcttcggcgattcacgtctttctaacgcccgttctgactgtcttgatttgcttgacatgtcctctgatgaactcgattggtct

SEQ ID NO: 51000 - DNA, 380 bp, Glycine max
  Clone ID: LIB3167-003-P1-K1-H12
cccacgcgtccgattacattcgccgcggcttttatcactcacccgaagggccttttcttcttctccttcttcctttcaaggaggggtttctatggttcaaggagcttccagaggaattggcctcgaatttgttaaacagattttagaatacgatgataaagagcatgttattgctacctgccgtaatcccagtgcatcaactgggcttatccatctgaaagataaatttgcagaccgccttaaaattttgtcgttggacttgactgttgaaacttcaattgaggcatctgcattgtcaataaaagagacatatggccgtctaaaccttcttattaatgcatctggcattctttcaatacctgaagtaatgcatccagaaa

SEQ ID NO: 51001 - DNA, 126 bp, Glycine max
  Clone ID: LIB3167-003-P1-K1-H3
ccctttactttgtgtctgtgtgtcctggaatggctggcattggtttcattcaaattgcattattggtctctttttttggtgcaaccagggccagaattcctggaggttacacccgtgggccctggc

SEQ ID NO: 51002 - DNA, 387 bp, Glycine max
  Clone ID: LIB3167-003-P1-K1-H4
cccacgcgtccgcccacgcgttcgctcacgcgtccgcccacgcgtccgcccacgcgtccggtttgttgtgagctataagctagtttatcgtgaggagaatatgaagctgtttgttttctttgttgctgcactagttttggtagcatggccatgccatggcgcatgctaccaaaggttccctctccgaatgaaaactggctatggtgagcgttcttcggaggtaaaatgcgcaagttttaggcttgctgtggaagcacacaacatccgagcctttaaaaccattcctgaagagtgcgttgaaccaacaaaggactacattaatggcgaacaatttagatcagactctaaaacagttaaccaacaagctttcttttatgctagtgaacg

SEQ ID NO: 51003 - DNA, 418 bp, Glycine max
  Clone ID: LIB3167-003-P1-K1-H5
ggtaccggaacgccagggtcggcccacccgtccggtttcttacaaggctctactctactgcttaaccttctgctctagaaaattcagtggtgagacatggcttcggctactctctctgtagccaaaccagcccttcaggcaaatgggaaaggcttctctgaattctctggcctccgcagctcatcaggcttccttcccttttctagaaaatcttcagaggatttccattctgtcattgccttccagacctatgcagttggaagcagtggaggatacaagaagggtgtgacagaagcaaaactgaaggttgccataaacggatttggaaggattggaaggaacttcttgaggtgctggcacggtcgcaaagactcccctcttgatgtcattgccatcaacgacaccggtggcgtgaaac

SEQ ID NO: 51004 - DNA, 416 bp, Glycine max
  Clone ID: LIB3167-003-P1-K1-H6
tacggaatcccagggtcgacctagacctacccgtctagtcatggcgttcttctatatctgttgtcaaccttcttaccctcgctctgtcactactcttctgcattgccttaacttccgaggttggcgtgcaggcgcagatggaggagacaggcttgaacctcatgtcggaggcgttggagtggccaaccgcaatgtcgctctacgacgaagacagcgaagaagaggatgtccagaacggttacagtcggagatcgttgttctggcggaggatgaagtactacatctcctacggcgctctttccgcgaaccgaatcccgtgcccacctcgttctggtagatcttactacacccacaactgctacagggcccgaggccccgttcacccttactccaaaagctgctctgtcatcacgcgc

SEQ ID NO: 51005 - DNA, 378 bp, Glycine max
  Clone ID: LIB3167-003-P1-K1-H7
cccaagccctatacaaccaaacccttacacacacccatttgattcagtttccatggctagcctcaaggttgcatttttggctgcagtgctctgcatggttgtggtgagtgcacccatggcacatgcagctatcacgtgcgggcaggtgacgagtagcctggccaattgcatcggttacctccagaagggaggaacgccgtcgtcgggatgctgcaacggagtgaagagcctcaatgccgccgccaagaccaccgccgaccgccagacggcgtgcaactgcctcaagtcggccgccagccaaatctccggcttcaacgccaacaacgccgcctcgctccccggcaaatgcggagtctccatcccctacaagatcagcac

SEQ ID NO: 51006 - DNA, 376 bp, Glycine max
  Clone ID: LIB3167-003-P1-K1-H8
cggacgcgtgggaattaacaaaaatggtttacagatgttacataacattatgaagcagtacaggcatgacttcaaaaaaattccaatactacgaaagcttcttaaggtcttggagttcctagaagcaagcaagattttgacatctgaacatattaatggtggtcctccttgtcatggaatggagagctttagagagtcaatgctttctctgacagagcatgaagacaaacaggtccatcaaattgctcgaaacttccgagacagatggtttcccagacacgccagaaaacatggctatatggacagggatgataacagagtggaatctcacagaagtttcaagtgcaacagattttcagcatcacacagtcagagg

SEQ ID NO: 51007 - DNA, 378 bp, Glycine max
  Clone ID: LIB3167-003-P1-K1-H9
attcaacaatggtacctcaagctttgtcagtgcctgcgagtgccagcttcactggcgcttctcgcaccagaagtccctcccacctcgtattttctcacagaaacccgtgctcgatagcttcttccttaccaaacccatatggccattcatcaggagttgggttatcaagtaaaagccgtggttttcctttaaaacttgatgagaaaaatatccatggtgcgagtacaagttatggtgcaattgaagccaaggggaatccaccaataacacccgcagtgatgactcctggaggacctcttgatctctcatctgttttgtttaggaatcgtataatattcataggacaaccagtcaattcacaagtggctcagagagtta

SEQ ID NO: 51008 - DNA, 383 bp, Glycine max
  Clone ID: LIB3167-005-P1-K1-A1
ggaagcatgatggagacgatgatgttaatgatgtgcacaaacacaaaaagagcgggcacaagagctcaaaaattgatgaattgggggcaattaaggttgcaggctaaaatggtaccgtacagtagttcacttcttttcctcaattggttgttgtcatttgttaaatttggaggggtctttcaattgacattatcaaatttcttgagggtagctagtgatctgactaaagattatcatgatggtgaattcacctgacgaaggaaaaggatgcaggtaaaattggatgaagataaacttttttttcccttttgtacaataacaattaccttataagattggcaagaatttgcaaaacttgtagcttttttcttttcccagtcttt

SEQ ID NO: 51009 - DNA, 378 bp, Glycine max
  Clone ID: LIB3167-005-P1-K1-A10
cccacgcgtccgcgagccgtttctaattaatgataggtgtcaagtggaagtgcagtgatgtatgcagctgaggcatcctaacagaccgggatcatgaagcggttaacgtgagtgggcccaatgccgtggatatttcgggtttggattatccgaatacgattgtgtttatgggtgggtttgacccgttgcgtgattggcaaaggaagtattatgagtggttgagggaatcgggaaaagaggtggagttagtcgattatccaaacacgtttcatgctttttactttttttctgaattgcccgaaacttctctgtttgtttatgatgtcaaggagtttatggccaagcaaatggccaatgtggattgaaaggtattttagt

SEQ ID NO: 51010 - DNA, 386 bp, Glycine max
  Clone ID: LIB3167-005-P1-K1-A11
ggggatcttactctgtctgaatggaaaagaaaagcgtcaccgtgcagatccgtgattgagcaaaacgacgtcgtgctgctacgcatcgcatcgaagttgcaacaatggcgagttccgaatcgcaagagcatcatccatggatctcgaatgcagatcctttgttggtggttcttctaattgcacttcacgtcttcgctttggtgtattggatttatagattggccactgacaataagccacaacagcagcagcagctacaacaacagcaacagcaacatcaacagagaacaaaggctcactgaccgacaacaacaacaacaacaacaacaaacgttctcattcaatttcattttcttcaaacaattggtgtatgaaatttgtaattg

SEQ ID NO: 51011 - DNA, 376 bp, Glycine max
  Clone ID: LIB3167-005-P1-K1-A12
ggggatcttactctgtctgaatggaaaagaaaagcgtcaccgtgcagatccgtgattgagcaaaacgacgtcgtgctgctacgcatcgcatcgaagttgcaacaatggcgagttccgaatcgcaagagcatcatccatggatctcgaatgcagttcctttgttggtggttcttctaattgcacttcacgtcttcgctttggtgtattggatttatagattggccactgacaataagccacaacagcagcagcagctacaacaacagcaacagcaacatcaacagagaacaaaggctcactgaccgacaacaacaacaacaacaacaacaaacgttctcattcaatttcattttcttcaaacaattgttgtatgaaa

SEQ ID NO: 51012 - DNA, 380 bp, Glycine max
  Clone ID: LIB3167-005-P1-K1-A2
cgggcgggaaatccggggggcgcccacacgcgtccggttttttttggttcctagttggaaccgggatcaaaagtagaaggatgatgtttgagtggttgggtctatttattatttcccggattcatgacgtgttctgcatatatatatgtttatgttatgcaatttgagatttatttttactaggcgttgtactgtctgtttcctttagttattttttgcctcagtgtgtgcccatcttctgctgtctgcgtgattaattctgcaactaattaaaaccattgaaagggacccgtcacttgagctcaacaatgcgtatgctttaaatatccttctgctagcatctgctaggaccttctatttacacttgggattatgtaatt

SEQ ID NO: 51013 - DNA, 378 bp, Glycine max
  Clone ID: LIB3167-005-P1-K1-A3
gtgatcctaaggcttttggtgcatatatatttgggccaaacggatcccccccaaatatcgtttcaagatcagtgcctacaaaggtaattcgtggaccactagttgatgaagttcatcagaaatttagctcttggatttaccaggttactaggctttacaaagacaaagaacatgctgaaatcgaattcactattggtccaattcctactgatgatggagttggaaaagaggtgatcacacgaatgacagcaaatatggccacaaacaaggagttttatgcggattccaatggaagagattttctaaaacgagttcgagatcatagggaagattggcctctgcaagtaactcaaccagtagcaggaaactattacccac

SEQ ID NO: 51014 - DNA, 384 bp, Glycine max
  Clone ID: LIB3167-005-P1-K1-A4
cccacgcgtccgcagcaccttcttcttcgttcacctcctccccgtcgcaacacaaagctacgctgcagcaatccaccactgcagggttttccaagtccaatctcagttcacttctcgccagggtttaatctgaatttcttttgtgttgccactgaggttattattatttttcttccaaaatggcgacggtgatgcaaaaaatcaaagacatcgaagatgagatggcaaggacccaaaaaaacaaggctactgctcatcatttgggcttgctgaaggctaaactagcaaagctgcggagggaactccttacaccttcatcaaaaggagctggaggtgctggtgaaagttttgatgttactaaaagtggggattcaagagttggtc

SEQ ID NO: 51015 - DNA, 382 bp, Glycine max
  Clone ID: LIB3167-005-P1-K1-A5
gttctaataacaacttttaaaattttgaaccctctcgttcgggccgatcactagggcacacttcatcaatggcgggtagaggcaaaaccctaggatccagcgccgctaagaaggccacctcaaggagcagcaaagccggcctccaattccccgtcggtcgtatcgccaggttcctcaaggccggaaagtacgccgagcgcgtcggcgccggagcccccgtctacctcgccgccgttctcgaatatctcgctgctgaggttttggaattgcctggaaacgctgcgagagataacaagaagactcgaattgttccacgccacatccaattggcggtgaggaacgacgaagagttgagcaagcttctaggagatgttaccattgc

SEQ ID NO: 51016 - DNA, 223 bp, Glycine max
  Clone ID: LIB3167-005-P1-K1-A7
aataaaatgaacaaaagcctttaaaactatattgctaacaaacacggagatattacatcaagaacatacacatcatcactgaacaagagaaatggagcctctcaacggggcactctttttctacttagtatctcttgttcttttagtcgatgttggaatcttgcaaggcgtgcttggagactaacgagactagctgctttgcgagaaagcacgaaactcaact

SEQ ID NO: 51017 - DNA, 388 bp, Glycine max
  Clone ID: LIB3167-005-P1-K1-A8
cccacgcgtccgaacccaacccaaaactcaagctaaattctcactctcacaacttcaatctctttctctctctctctctctctctctctctaccaaaaaaatggctttggaaactctcaactcaccaacaacaaccgccccatctttccccttcgacgacccaactattccatgggccaaaagaaaacgttcaaagcgttgttcacgcgaccacccttcggaggaagagtacctcgctctctgcctcatcatgctcgctcgcggcggcaccacccgccgcgtcagcactccaccgccgcaaccgactccagatccttccaccaagctcagttacaaatgctccgtttgcaacaaaagcttcccctcttaccaagcgctcggtggacac

SEQ ID NO: 51018 - DNA, 376 bp, Glycine max
  Clone ID: LIB3167-005-P1-K1-A9
cccacgcgtccgtatccattcaccacagagtttcttcaatggcccagcctcaaccagagtcccacgccaccaatggctcacacgagccattgctcaaaatcccaaagctccaccaaaacggcgacgtttccgcaaccgctccctttctccgcgtcaagaagctctccgacaaggccgttttgccctctagggcttcccctctctccgccggttacgatctctctagcgcggtggagacgaaggtcccggcgagagggaaggctctggtggccactgacatcagcatcgcgattccagagggcacatatgctcgcgttgcgccgcgttcggggttggcgtggaagcactcgatcgacgtgggtgcgggggtgataga

SEQ ID NO: 51019 - DNA, 405 bp, Glycine max
  Clone ID: LIB3167-005-P1-K1-B1
accaacgcgtccgcccacgcgtccgtctcggtgttgttgttcttcatccatggcttttcctcagcagcgcttccaacagcactaccaaacccaacagcaacaacagccacaaaacaaatccttcagaaatctgcaaacaatcgatggtcagatgtcacagcaggtggcgttttacaaccctactgatttgcaagatcaatcccaacatccaccctacattcctccatttcatgttgttgggtttgctccgggtcctgttcctcctgctgatggcagtgatggtggagttgatttgcaattgcaatggaattatggtttggagccagagaggaagagactaaaagaacaggattttttggagaacaattctcagatatcttctgttgatttccttcaaccacgatc

SEQ ID NO: 51020 - DNA, 208 bp, Glycine max
  Clone ID: LIB3167-005-P1-K1-B10
aaatgcctgaggatcactatgattgtgactcgatacataccaacggtagctttgctgagtcaggacatcaactatgactattggaatatgttcacatgacgcatcacttttatctcacactctaaaactgtgagaataccctctgatagtgtacatgcacattaacacgttcatgaacaacgaaagatactctgtatccccctctaaa

SEQ ID NO: 51021 - DNA, 331 bp, Glycine max
  Clone ID: LIB3167-005-P1-K1-B11
caatatggaaggttgatatgggatcttttggtatcaggggtgaagcctgatgacgtatgttcacaagttgggttatgttcttccaaaaggcatgaatctaagagtgctggaattgaaatggtgactgaaaaggagcagggagagttgacggcaagagataatcctttgcgttcttcttgtcagatgcttgctctttggatccagaatcaactaaaacaaaaggcaacgaaggacagagtattcaactatgtgaatcaactgtgtgagagcctaccaagtccatctggagagtcagtgataagctgtaatagtctttccaagatgcgcaaca

SEQ ID NO: 51022 - DNA, 337 bp, Glycine max
  Clone ID: LIB3167-005-P1-K1-B12
gttaacaatattactcggcttcaatgtttccttcttttatccaaaaactcaaatgggcatggccacaatcacaatgggaggaaaccacaattcctccatcactccacgccactgcgccacccacaaggggttccttttttgcaactacattctttcgggtgcatattttagctgcatcttactcaccctctatctgcgcctcattccctatctatgcggctacttgtaaaaccttcttcaggcctatacgattgcgggcgcagtatatgggtgctccgccaggtggactaacaggaggtactctgcacacattggggccactgaactaacggctatc

SEQ ID NO: 51023 - DNA, 252 bp, Glycine max
  Clone ID: LIB3167-005-P1-K1-B2
aactttaaatccaaaatcctttttaagcaaactaagggttgctaggcaccagaagatcctcttgcattcaaaggtgtattaggaacacttgaagcatcatttgaatgtgtttgatcaggagtgaaataactagctaattcttcagggatccttcctttcttcattatcatgtaggccttaaaagctgattctaaattgttgtatttctcttgccattggtttgaagattgaaatgcaacaccagatgaagaa

SEQ ID NO: 51024 - DNA, 303 bp, Glycine max
  Clone ID: LIB3167-005-P1-K1-B3
tttgaccagcctaacctgggggtttaatgggatacttgcaatttgatgagcttgtcaaaagaggcattattcccttccaagatgaaagtttcactactgatgggtcattggatacaaatctagactggatatctggaatgaaaaatatgcgaatcagagattgtccaagtttcgtgagaactaccactctagatgaaaccagttttatttgctttggtatagaagcaaaaacctgcatgaaatcatcttcaatcataattaacaccatccaaaaattggaaagtgaaagtctcaatgccctta

SEQ ID NO: 51025 - DNA, 373 bp, Glycine max
  Clone ID: LIB3167-005-P1-K1-B4
gctgaacagttgattgttggtagccatggctgcagcagccaccgcgaaaccgcttctgtcactgtggtttatgcttctgctaccgtcgtttcttcggatcgccgtcgcttaccgacccggcgacatcgttcccatgagctgcatgggtcaataccactcctcgcgaaccgtgtggcaggacctcattggccgccactgccccatcttcgccgtgaatcgcgaggtgttgatgcccatacccaagcccacgggttacactggtgctgatgcttataaaatattgtttcaagttggaagggaaaagtttttaatcccgtggcttcttgtggtgaatcggaaaagtacagaggttccaatgatcgaagtagatctg

SEQ ID NO: 51026 - DNA, 265 bp, Glycine max
  Clone ID: LIB3167-005-P1-K1-B5
ggtttccgttttcttaatatggatggcttcagcccttcatgctgctgttaactttggacagtatccatatggaggtttaatcctaaacaggccaactattagcaggagattcatgcctgaaaaggggtctcctgaatatgatgcgttggctaagaaccctgagaaggagtttttgaagactattactggcaagaaggagaccctcattgaccttacagttatagaaatcttgtcaaggcacgcatctgatgagttctaccttggg

SEQ ID NO: 51027 - DNA, 305 bp, Glycine max
  Clone ID: LIB3167-005-P1-K1-B6
cccacgcgtccgcactgtttaagtttacaaggaggagggtatatcttctttggaaatgcatatgattcagctcgagtgacttggactccaatttcatctgtagattccaaacattactcagcagggccagctgaacttgtttttggaggaaggaagactggggttggaagtctgactgctgtttttgacactgggagttcttacacttacttcaactctcatgcttaccaagcactactttcttggctgaataaggaattaagtggaaagcccttaaaagtagcacctgatgatcagactttatc

SEQ ID NO: 51028 - DNA, 368 bp, Glycine max
  Clone ID: LIB3167-005-P1-K1-B7
cccactttcatttcatttccgttttttctccaaaaacgtctctctctctctcggtcttttccctttaaacgccgaccaacgacacgacaccgtttcgatggtggtgaagatgatgcggtggaggccgtggccccctctcgtctcgaagaagtacgaggtgaagctagtcgtgaagacactaactctccagggctgcgatctggtgcgcacgtccgcagagaaaggtttcgtgctccagattaagtggaagggtcccaaacttaccctaagctctctgcgacgcaacgctgttgctagaaacttcaccaaagaggtgcaccccgagcaaaacgacgacttcgttttgggggacgaggagttttacgcgc

SEQ ID NO: 51029 - DNA, 386 bp, Glycine max
  Clone ID: LIB3167-005-P1-K1-B8
gaaagaaaaaaaatgaatctcttgtattggagttagagactcgaaatcgggcaaaagcagaataccctgatcaacgaaatcttgaatcatctatctcaaaccaagaaaaagatattgaaaacgattatgtaggatcagacagtgaaaagaatagtaagggtataaagaaaaagaaagacaagaacaagatggaggcagaacttaatttcttactaagaaattttttgattttacatttaaattggaataatttcttaggtcaaagaatatttaacaatgtcaaagtatattgtctcctgattagattaaaaaatttaagagaaattacaatagcctttattcaaagaggggaactaggtctagatattatgatgattcaaaatcag

SEQ ID NO: 51030 - DNA, 310 bp, Glycine max
  Clone ID: LIB3167-005-P1-K1-B9
cggacgcgtgggttaagatgtagctagttactctagtctaagtcttgtacacacaaaaaaaaaaagttactcaagtctaaattttatctttttctgtgtattttttgcattttagtgaatggaaattagtctttgaataaaaaaaagttgcaataacttttattcaaaaaaaaaaagacaaaaacaaaatagaaagcaaaaactaaattacttactaagaaatattttgattttacatttaaaattggaataattgcttaggtcaaaagaatatttaacaatgtcaaaagtatgtgggctcctggggggg

SEQ ID NO: 51031 - DNA, 384 bp, Glycine max
  Clone ID: LIB3167-005-P1-K1-C1
gaaaaatttttgaataataattaaaaaattccttcatatttttagagataggagacaaaatttacatggatatagtaagtcttgcttgggctgctttaatggtagttttttcattttctctttccctcgtagtatggggaagaagtggactatagggatactcaaaattgagttaagggatcaaagtacccattttgttttctacttgggtttttcaatttcttaactttaactattgaattaaagtatttcatttatactaattaattgagttcaaatataaacaaatataaaatagatctgcatttcagggttctattatattctagtagtgtaatggattctatggatatgtatattatagaaattgaaaatactctttca

SEQ ID NO: 51032 - DNA, 343 bp, Glycine max
  Clone ID: LIB3167-005-P1-K1-C10
tttttcttaagaagtgcgattttcgtttctcttctctgcaactatgcctaaccgtaaggtcttcttcgacatgaccatcggcggtcaacctgccggccgcatcgtgatggagctctatgccgacgtgactcccagcaccgccgagaacttccgcgcgctctgcaccggcgagaagggcgccgggcggagcggcaagcccctccactacaaaggctcgtccttccaccgcgtgatcccgaacttcatgtgccagggcggcgacttcaccgccggaaacggcaccggaggcgagtcgatctacggcgccaagttcgccgacgagaacttcttgaagaagcacact

SEQ ID NO: 51033 - DNA, 329 bp, Glycine max
  Clone ID: LIB3167-005-P1-K1-C11
ccaacccttccggccttgccaacatttcattgagaattactgcagcaggaagatttggtcttacaatgatgttaatgtcgatggaaaacccacgcagggtggctttgctgaaaccatggtcgttgagcaaaagtttgtggtgaaaattccagagggtttggcgccagagcaagtggcaccattactgtgtgcgggtgtgacagtgtacagtccactggtacactttgggctgaaagagagtgggctgagaggtggaatattggggcttggaggagtgggacacatgggggtgaagatagcaaaggcactgggtcaccatgtgactgtga

SEQ ID NO: 51034 - DNA, 333 bp, Glycine max
  Clone ID: LIB3167-005-P1-K1-C12
ctcttcttcttcttcttcacttgtacactcttcaaccactcaacaaagtggttggtttttggttcttaagccatggcatccacatcctctctgcatctatctcaggcccttctggcacgtgctgtgtaccttcatggctcttcttctgaccgtgtctcactctccttcccatcattctctggcctcaagtcacattctccatgcaaagcagcagccacgtcctcacgtagaaggggtgcttgcgcttccaccagcgttgttcgagccgctgcggttgagacactggaccagaccactgaggtttctctggtggagaaattcgtcaacaccatt

SEQ ID NO: 51035 - DNA, 324 bp, Glycine max
  Clone ID: LIB3167-005-P1-K1-C2
ttggaagcctttttgggagtaagaaaaaaggcttcctgcacggagcacaccaacttgatacctctgattctttctttgcttagaattccacagaatatggagactgttcttttcaatcactccccacctttggaattcaagggtttgagcaaggaggaggaagactcattgctagggcaagtggaaatatggaggtacatgacatgcttcacggactccgtggccttgaaagctgtcatagagcttcgtatagcggacatactagaccgttatggtaaaccactatccttgtcgcaaattgtggagaacatagaagacgcaccc

SEQ ID NO: 51036 - DNA, 388 bp, Glycine max
  Clone ID: LIB3167-005-P1-K1-C3
cttcgatccaacttgggttcaggttaagggattggctgcaatctaagctcgaaaatcactggttgctcttcgtgcgcgccaattggctgtaagcggtcaagggctgcacagctcccaatactatggccttcggttaagtgcacactccttctctaccaaaagagaggatgaggaaagggagcaactcgcaaaggacatttcaaaggattggagttctgtctttgaacgtagcattaacactctctttctcactgaaatggttcgaggactaatgctgactctgaaatacttctttgaaacaaaagttacaatcaattatccatttgagaaaggccctttgagccctcgtttccgtggtgaacatgcactccggcgatatccaacaggg

SEQ ID NO: 51037 - DNA, 344 bp, Glycine max
  Clone ID: LIB3167-005-P1-K1-C4
aagaagtgtcggcatcctccaaggccaaggttgcagcagatgcagcattggattataccgacattcctgtctctcagatacggaaggtcacagcttcacggttattattatcaaaacaaactatgcctgattactatttaacagtagatacatgcgttgataaactcatgagcttgcggacccaactcaattcattgcaagaagcctctggtggctctcgcatatcagttaatgaccttggtatcaaggctgctgctttggctctccgtaaaggtcctcaatgtaacagttcatgggcaaatgattatattcgccaggatcataatgtgaatattaatgttgct

SEQ ID NO: 51038 - DNA, 312 bp, Glycine max
  Clone ID: LIB3167-005-P1-K1-C5
ctcaattgcaaatacagaaagtaatctatcaatttgagggctatgtgtaaccggtatctgctcaactgcagatgaagatacaatggggagagaataaaactttattataataaaaacaaactatccctcattactatttaacagtacatacatgcgtttataaactcatgagcttgcggacccaactcaattcattgcatgaagcctttggtggctctcgcatatcagttaatgaccttgtaatcaaggctgctgctttggctctccgaaaagttcctcaatgttacaggttatgggcaaatgattatattc

SEQ ID NO: 51039 - DNA, 383 bp, Glycine max
  Clone ID: LIB3167-005-P1-K1-C6
gttagtcgttggaactcgctctttttatcttaccgttataaacttgagatatgcggcttctctcacacagaaaatgtctagccgcagtggtaactgtgggtgctgaagctaatgcaagtgcggaaacggatgacgaggctgaaagatgtacccagacttgagctacactgagtcaaccaccaccgagaccttggtcatgggagtggcacctgttaaggctcaatttgagggtgctgaaatgggtgtgcccgctgagaacgatggctgcaaatgtggaccaaactgcttctgcaacccctgcactagcaagtgaggtgttgggagagcaagcttcaagcagagatagcccttaattaggaataatgataaactattaatgtgta

SEQ ID NO: 51040 - DNA, 389 bp, Glycine max
  Clone ID: LIB3167-005-P1-K1-C7
cccacgcgtccgcccacgcgtccgttcaaagatagtgttgtttggagactccataacggagcaatcgatccgagagaatggatggggtgttcctcttgccaatgcctattctcgcagggctgatatacttgttcgtggttatggtggatacaacactaagtgggctatgttcttactggaccatctcttccctctggactcaactaaaccacctattgctaccacaattttcttcggcgctaatgatgcagctttgttaggaagaaccagtgaaaggcaacatgtacctattgaagaattcaaagagaacctcagaaaatttgttcgacacttaaaggaatgctcaccaactatggtaattgtgcttattactccaccttcacttaacg

SEQ ID NO: 51041 - DNA, 381 bp, Glycine max
  Clone ID: LIB3167-005-P1-K1-C8
cccacgcgtccgactagaaacagtgtgatgaaaatgaaggtccttgttttcttcgttgctacaattttggtagcatggcaatgccatgcgtacgatatgttccctctccgaatgaacactggctatggtgcccgtactccggaggtgaaatgcgcaagttggaggcttgctgtggaagcacacaacatctttggctttgagaccattcctgaagagtgcgttgaagcaacaaaggaatacatccatggcgaacaatatagatcagacttcaaaacagttaaccaacaagcttacttttatgccagagacctcgaagtccatcccaaggacacatttgtgttcagtatagatggcaccgtactctctaatattccatactac

SEQ ID NO: 51042 - DNA, 384 bp, Glycine max
  Clone ID: LIB3167-005-P1-K1-C9
cggacgcgtgggcggacgcgtgggcggacgcgtgggtgttgccactgtatttgaacagccaggttctgagggcattgcaggagtccttggcgagtgaacttgccgcgagaatgagtgccatgagcaatgccacggataatgctattgaattgaagaagaacttgtccattgtgtacaatagggagcgccaggctaaaatcactggtgaaattctggaaattgtggctggggccaatgccttgcaatagtgcagtttgtaggtattgcttacttattataatgatgatgggtggtggttgcccatttcatttactaatgtgtttggctctaagatacttgttcaatttttacgcttctgttgaaacttgaatgaaatgcgcaagc

SEQ ID NO: 51043 - DNA, 213 bp, Glycine max
  Clone ID: LIB3167-005-P1-K1-D1
ccacccgtccgaggaccctatggttgcttaagtactgttcctggttttaaataaatgtgaaattgaaggaaccagattccttaatcagttgtgtatgcttaagtcatgtatttggagtggctgaatgtatttgtatttgtcattaataaagagagttgtgttagtataatggaaaccaaaataataaatgcaatcatgcatgttttaactttt

SEQ ID NO: 51044 - DNA, 343 bp, Glycine max
  Clone ID: LIB3167-005-P1-K1-D10
attaatgtgcggtgaggattcggagtacttggtgaagatgcacggaggcacctatggggtattcatgaagttgctccaagagcaagaggaaaagtgggacctctacaagctcgtccaaggagagttcccggagcagcatgacttgcctctctacgatggctttgtcatcagtggaagctgctatgatgcacatgccaatgacccatggatccttgacctcattgctctcgttatcaaattggactccatgcacaagaagatccttggcatttgctttggccaccagataattgggcgtgcattgggaggaaaagtgggtcgctctcccaatggttgggacatt

SEQ ID NO: 51045 - DNA, 356 bp, Glycine max
  Clone ID: LIB3167-005-P1-K1-D11
gggccaatccaattttccatttccatggggaatatttcttctcatcgagaagcttcgcgaacgaaaacaaagaaccctagacagatccattccatagccatgtcaggtgttggccctctatctcaggattgggaacccgtcgtcctccgcaagaaggctcccaccgccgccgccaagaaggacgagaaagccgtcaacgccgcccggcgctccggcgcggaaattgaaaccctaaaaaagtataatgctgggacaaataaagcagcatctagcagcacttcattgaacactaagaggctggatgatgatactgagaatctagctcatgagaaggtaccaactgaacttaagaagcc

SEQ ID NO: 51046 - DNA, 389 bp, Glycine max
  Clone ID: LIB3167-005-P1-K1-D12
cccacgcgtccgcccacgcgtccgtattataccaaccatggcaaactaatgaacggggcaagttgatggtcaagagcgtgaaaaactaacaagactcaatctcacgaggtggagtgcggattggaaaagtgctactgttctttatgagcaggcagctaatgggtttagagttgccaaggactatgagaattctaaaatagcatatgagaaagcttcgaaaggacaagaaatgctttcttcaccttgggatgcggttaatcacatggaattcgctgctgctctcgcataggatctaagacactggcaagaagttgtggacttttatctaaaggcatttgaattatatatggagtgtgggatgaccacatcctgtttcagatgctctttgc

SEQ ID NO: 51047 - DNA, 335 bp, Glycine max
  Clone ID: LIB3167-005-P1-K1-D2
gggggtggcggcgggccttcctgggattttgcccacattggatggatatgaccaacttgtaaatgaattggagaagatgtttgacataaagggacagcttcaacacaggaataagtgggaaactgtcttcactgatgatgaaggggatatgatgcttgttggtgatgatccatggcctgaattctgcaatatggtgaaaagaatcttcatttgttcaagccaggatgtgcacaaattgagctcaaggagcaaactacctatctcttctatgggagagattgtaataagcttaaacacaaccgagacctgaaacttttacattcttgttcttacta

SEQ ID NO: 51048 - DNA, 385 bp, Glycine max
  Clone ID: LIB3167-005-P1-K1-D4
caatagcatactcttactctgattcgttagtgaagaaaaatggcaacaatcatggccggcaccccaactacatcaatcactcgcacaggtcatgtgctcaaacgacctgttggggcctcatcctctaccgttcttggattgccagcaatggccaaggcggggagagtgaggtgctccatggaggaaaagccttcaagcagctcaaacctagggatgggggcatccttgttagcagctgcagctgccgcaaccatgtcaagcccagcagccatggctttggttgatgagagactcagcactgaaagaactgggcttccctttgggcttagcaacaaccttcttggttggatcctgtttggtgtctttggtctcatatgggctctct

SEQ ID NO: 51049 - DNA, 382 bp, Glycine max
  Clone ID: LIB3167-005-P1-K1-D5
gttgatcgagataactagaaacagtgtgatgaaaatgaaggtccttgttttcttcgttgctacaattttggtagcatggcaatgccatgcgtacgatatgttccctctccgaatgaacactggctatggtgcccgtactccggaggtgaaatgcgcaagttggaggcttgctgtggaagcacacaacatctttggctttgagaccattcctgaagagtgcgttgaagcaacaaaggaatacatccatggcgaacaatatagatcagactccaaaacagttaaccaacaagcttacttttatgccagagacctcgaagtccatcccaaggacacatttgtgttcagtatagatggcaccgtactctctaatattccatactac

SEQ ID NO: 51050 - DNA, 381 bp, Glycine max
  Clone ID: LIB3167-005-P1-K1-D6
cccacgcgtccgcccacgcgtccgatagcttcaaggttttaaattggggttgtggttttgtcacaatccctgatactgcttgaaattgtggataaatgccgccaatgtggttgccattgatccaaaacaatttaacttcgtttccttttcgataacaaaagtacttatataattgcttatatgataaaactcttgattgcttatatgatgaacatttcagaagagtttgattatggcttatttgttataacatagatgcttagtgtttgtttgggagagttcacaaaaacagcttatgatagctttgaggtttttagttgtggtcacagtccttgatattgcgagaaattgcagacaaatgccagccaaaatcactgtcgc

SEQ ID NO: 51051 - DNA, 358 bp, Glycine max
  Clone ID: LIB3167-005-P1-K1-D7
cccacgcgtccggagacgtgtgggccttccttttaacttgcaaggtgaactatggcagcctttatgatcaaggttatacttcaattgggagcatatacgacacagttcccaactcattattatgcattagcaattcttccaataaattcaaacctgcatatttacttgctgacggaagattagagagggcagggagggctaaaaggccatctacttcaactggtggacaaattcctgcagagagcaatggcctgactagccaggattcatataaaaacagcatgctcacagcatcaatcattgctgtgggagatgagattctgtttggcaatcttgaggatctgttgggaccttattt

SEQ ID NO: 51052 - DNA, 387 bp, Glycine max
  Clone ID: LIB3167-005-P1-K1-D9
cccacgcgtccgcccacgcgtccgtgtaacttctctcttcaaccctagcttagggtttatgctctaaaaccctcccttttcaggtttattgggagagaaaaatgctcgtattgtttgaaacacccgcgggttttgccctgtttaaagtgctggatgaaggcaagctttctaaagttgaggacttgtggaagaacttttccagtgcagatactgctagacaggtggtcaagttgaaagcattttctaaatttgagaacacttcagaagctctagaggcagctactttacttattgatggaaaagctagcaagggtctccgcaagttcctgcgtttcattgtgaaaatgaaacactaggtgtggcagattcaaaagctgggaatgtgat

SEQ ID NO: 51053 - DNA, 341 bp, Glycine max
  Clone ID: LIB3167-005-P1-K1-E1
caggtgtttcttctcttactgacagtttatagttcagcagcactgggacagctgttcttctttcatgtagttctcatacgaaaggtagttttgtttcctgtttttgaaactatcaatgatcatatactactatgctttgatatttaagacaaacacacatgctattaaatcaataataatcagtttgcgaaagtgctttgccatcaatttctagctatgtccttttattggaatgtcctttgctattgaatcctgttgtatctgttattgatgaaaggaatgagaaccttttacttatattctagccatgaaaggagagaatgtagccatggaatttgaat

SEQ ID NO: 51054 - DNA, 383 bp, Glycine max
  Clone ID: LIB3167-005-P1-K1-E10
ccaacccttccgtttggcggcccgattttggaggactaccccgaggagtcgtggcggtggtacgtggttgttgcggagaacgcgacggacgtgggaatccgcggcggcggagcggtggacgggcaagctgcgaagttcgtggtgagggaagatccgaggaagaacgttatggttagttggaatcaaacaggggcttgcttgggagacgaatgcagacccaggctcatcggttttctcgattgcaacaacgttcaagtctctaacattactctcaaccaacctgcttattggtgcttgcacttggtgcggagtaacaacatatgcattcaagatattgcaatttatggggactttaatataccgaacaatgatgggattgatat

SEQ ID NO: 51055 - DNA, 366 bp, Glycine max
  unsure at all n locations
  Clone ID: LIB3167-005-P1-K1-E11
ttccttttttcaacgttgaatatggtaattattctggcccggtattgagaaaatactttttcgctgaagctctgaataacagaccatcatcgacagatggggtctgaaggtcctccagcagctgtggcaacagttcatgtaacaggtttcaggaaattccatggagtttctgagaatccaacggagacaattgtcaataatttgaatgaatatttgaacaagaagaagggtttgccaaaaggcttagttattgggagttgcagcattcttgagactgcangtcaaggagcactcattcccctctaccagacattgaagtctgccattacttccaaggaatcagaatcttcaagttccaataaaatt

SEQ ID NO: 51056 - DNA, 387 bp, Glycine max
  Clone ID: LIB3167-005-P1-K1-E12
ctctgctcgtgcctctagggttatcatatctccatttccatttcctctctctcaggttgcaagaatcttaagctatgggaaagtcttacccaaccgcgagcgctgattaccagaaggccgttgagaaggcgaagaagaagctcagaggcttcatcgctgagaagagatgcgctcctctaatgctccgtttggcatggcactctgctggaacttacgacgtgagctcgaagaccggtggtcccttcggaaccataaagcacccctccgaactcgctcacggcgctaacaacggtcttgacatcgctgttaggcttttggagccactcaaagcggagtttcctattttgagctacaccgatttctaccagttggctggcgttgttgccg

SEQ ID NO: 51057 - DNA, 324 bp, Glycine max
  Clone ID: LIB3167-005-P1-K1-E2
aaagagcggaattttcagtccctaacaggcacttgttgtgaagccagtgcacaggcaaatgatggggaagagcaagggaatgagaattgcgtgccaagccaccaacattcctgctgatagaagccctgacatgggctaaagaccgctgaatgatctgctttttcttggtgccaattgaatcccctctgctggaatgcttattgcctacacctacttttttgtgccttcacgttcaggctcttgatctggaggcactgatgccaaggatgctgtgggaaatgatgtaattgcagagaattggctgaaggcacatggacctgggga

SEQ ID NO: 51058 - DNA, 399 bp, Glycine max
  Clone ID: LIB3167-005-P1-K1-E3
agccttcggccaacccttccggccaaaagtcgcattctaaccaaccatggcagcttctgatcccgacaagttgatggtcaaagctgataaactaacaagactcagtctcacgaggtggagtgcggattggaaaagtgctactgttctttatgagcaggcagctaatgggtttagagttgccaaggactatgagaatgctaaaatagcatatgagaaagcttcgaaaggacaagaaatgctttcttcaccttgggatgcggctaagcacatggaatccgctgctgctctcgcaaaggatctaagacactggcaagaagttgtggacttctatcgaaaggcatctgaattatatatggagtgtgggagaccacaacctgcatcagatgctcttgcaaaggg

SEQ ID NO: 51059 - DNA, 375 bp, Glycine max
  unsure at all n locations
  Clone ID: LIB3167-005-P1-K1-E4
acaaaaaccacttaattagtccttctcacatccaaaatcttgtgccagcaaatcaaacatggcatccatgactatgcttcagaccatgattcctaagaatgcaccgaacctccctcctcgtgttggtgcttcttccaacaacactactaagatctcatttggtggctcaggtagggtactgtggaccgggattcagaggaacaggaataataggtcttcttcgattgtagttgctgcagttggagatgtttcatctgatggcactgcgtaccttgttgctggtgccattgctgtggctctagttggaacggccttccccatcttcttctctcgcaaagacacatgccctgaatgtgatggagcanggtttgtgcg

SEQ ID NO: 51060 - DNA, 337 bp, Glycine max
  unsure at all n locations
  Clone ID: LIB3167-005-P1-K1-E5
acaaaaaccacttaattagactngtgtacatacaaaatcttgtgccatcacgtgagacatggcattcatgactgtgctccagaccatgattcctaagaatgcaccgaacctccctcctcgtgttggtgcttcttccaacaacactactaaaatctcatttggtggctcaggtagggtactgaggaccgggattcataggaacaggaataataagtcttcttttattgtagttgctgcatatggagatgtttcatatgatggcacttcttaccttgatgctggtgctgttgctgtgacttttagtggaacggccttccccatcttcttttctctcaaa

SEQ ID NO: 51061 - DNA, 232 bp, Glycine max
  Clone ID: LIB3167-005-P1-K1-E7
cccacacgtccgaaaaacacttagtctttctaaaaacacacttctcacatccgggatcttttgccagcagacatggcatccatgaccactattcttcataccatggttcccaagtatgcacctaatctccctccttgtgttggtgttttcaacaacacttctaagatcttatttgctggcttaggtagggtaccgtgcacccggattcagaggaacaggaatagattttctt

SEQ ID NO: 51062 - DNA, 386 bp, Glycine max
  Clone ID: LIB3167-005-P1-K1-E8
gccactaacaaataccaaagaagactttgatgcagctcaaagagctcaagattttcagctgggctggtttcttgatcctttgatgtttggggattatccaagctcaatgaggactagagtaggaagcaggctaccgaaattttcgcaatcagaagctgctcttgttaagggttcattagattttgttggaatcaatcattacaccacattttatgcaaaagacaattctactaatttaattggaaccctgctccatgattccattgcagactctggtgccgttacccttccattcaatggtactaaagctatttcggaaagggcaagttctatatggctgtatattgtgccacaaagcatgaaaagcttaatgatctatatcaaac

SEQ ID NO: 51063 - DNA, 374 bp, Glycine max
  Clone ID: LIB3167-005-P1-K1-E9
cccacgcgtccggtcttgaacttctctgtgttctgaaacagcaacaatgacaaaaaccatgactatgtggtttctgttggtctctctttccttcatttatgctgttgccactgctaatactcaaatcaaaattactaacaaccctgcggacaagttggtagctgcaatcaacgaaaacagaactgctcacaaggtatcagccttaaccgacaacccggggcttgcgtgtattgctctacaatacattaaggcataccagggtgaatgtgatgctgtgggaggatctgatggcaagaaacctcctgagtctcactttgctgaagtttttgccccaaactgtggtgttgaggcatcaactcttgctcctataactg

SEQ ID NO: 51064 - DNA, 391 bp, Glycine max
  Clone ID: LIB3167-005-P1-K1-F1
tccgaaaagaaaaaaaaaacccttagccaacacaaccatcatggccacctctgctattcagcaatcagcattcactggtcaaactgctctgaagcagctcaatgagttcgtccgcaagaccggtggcgccggcaaaggtcgcactaacatgcgccgcaccgtcaagagtgctcctcagagcatttggtatggccctgaccgtcccaagtacttgggtccattctcggagcagattccatcatacctgaccggagaattccctggtgactacggatgggacactgctggattatcagctgacccggaaaccttcgccaggaaccgggagctggaggtgattcacagcagatgggcaatgcttggtgcccttggctgcaccttcccagagatc

SEQ ID NO: 51065 - DNA, 386 bp, Glycine max
  Clone ID: LIB3167-005-P1-K1-F10
cccacgcgtccgcccacgcgtccgggcatctacatgggacctcatacaaacattgaccaagggctgtttgcagtactaggtgcagcctccctcatggctggttccatgaggatgactgtatccctttgtgtgatcttccttgaactcaccaacaatcttctcctactaccaataacaatgattgtcctcctaatagccaaaactgttggagacagtttcaacccaagcatctatgagattatactgcacttgaaaggccttcctttcatggatgcaaatcctgagccatggatgagaaatctcactgtgggtgagcttgttgatgtaaagccatcagtggttaccctccatggagtagaaaaggtagccaaaatagtagatgtctt

SEQ ID NO: 51066 - DNA, 357 bp, Glycine max
  Clone ID: LIB3167-005-P1-K1-F11
gtggtctgcaactatgaccaaggattatctaatcatactttctctccttctttcgacggtgcttgcaactgcaagttcttcttcttcttcttcctccctctatcttgggaagggcttctcccatcgcaaattgtctcccagttatcacattcacaaaaccattgacgaatcctatgcagttatcttcgatgctggtagcacgggaagccgtgtacatgtctatcgttttaaccaacaattagatctccttcgcattggccaagaccttgagttgtttgtcaagactatgccaggtttaagtgcttacgctgagaatccacaagatgctgcagaatctcttattccacttttggagga

SEQ ID NO: 51067 - DNA, 355 bp, Glycine max
  Clone ID: LIB3167-005-P1-K1-F12
gttaggtgaagatgaagggctttatctcatccaacttgtgatgctgtatagaaggcaattcattcttggcttagttaagtggtgagaccagtgacatggtgtacactatggccttgtttggtctctcccttgcttttgtttctctctacaagtccatatgtaaaatggataacagaaagaaaaagaaaaatcactttggtttgagaactttttaaagtttatattaactgtgttaaggttcataaaactgtagactgatttgtgtgacatgctccacagaaccttaaattttcctctattttgtcctatatctccttgcacatttgttattctaaattggtgcatatattctaat

SEQ ID NO: 51068 - DNA, 381 bp, Glycine max
  Clone ID: LIB3167-005-P1-K1-F2
cttccatttcttttttaattttaactttaaacacaaaacccttcccatcctaattaaggtgaaaatgaaggcatcacccattgcttggttcactttggtggttgtgtttcttgtggctgaagttcaagtttcaatggcagtgacatgcagcccagtgcagctgagtgcatgtgtaagtgcaataacctcttcaacccctccatcaaacctatgctgctccaagatcaaagaacagaaaccatgcctctgccaatacctcaagaaccccaatctcaagaagtttgttgactctcctaatgcaaggagagttgctagcacttgtggaactcccttcccaaggtgctaagtgttaataaattggaagaggttttaatttctctg

SEQ ID NO: 51069 - DNA, 386 bp, Glycine max
  Clone ID: LIB3167-005-P1-K1-F3
ttaaactatgctccaacctcgaattgttggtgaagaacattatgagactgcgcaaagagttaaacaaactttacaacgttacaaagaacttcaagacattatagctatccttggcttggacgaattatccgaagaagatcgcttaaccgtagcaagagcacgaaaaattgagcgtttcttatcacaaccttttttcgtagcagaagtttttaccggttcgccggggaaatatgttagtctagcagaaacaattagagggtttaaattgattctttctggagaattagatggtcttcctgaacaagccttttatttggtaggtaatatcgatgaaactactgcgaaagctacgaacttagaaatggagagcaatttgaagaaatgac

SEQ ID NO: 51070 - DNA, 333 bp, Glycine max
  Clone ID: LIB3167-005-P1-K1-F4
caactgcgtccgctagcaaaacttctgatcgagatgtctacaatcgaatacttgctacttttgggaggctggaccagcccatatgccctgagggtgccaattgccctgaccctcattgatctagaatatcacgacgaagactagacctaccatactaaacgtgacctgcttgatatgtccaaccctgtgcacacgaaaataccagctgtgtttcatgccgataaagtcacatgacaatgtgcgatcatagttgagcacatacatgacgcttggactaatgttccctacatccttccacaaaatgcttaagatcgcgctaatgctcgatcttgg

SEQ ID NO: 51071 - DNA, 379 bp, Glycine max
  Clone ID: LIB3167-005-P1-K1-F5
gcttttaaatttgaacggtgtctgtttccaggtaaaatcctgaatatgtgaattcttaacatgcaatgcatgccgcgaaacgggggtccagaatatgatgcttaagctaaggacccgaagaaggaataggaggagactattaatgctactaaaaacacacttatcaaccttacaattatggaaaatctataaaagtacgcttatgatgaatgctatcgagaccacatagattgatgcgactacgtggactcatgatgctaagaacaataatggcctgtaataggcttggaaagcatctctaatatattgagatcatgctcatgctgactaacactattgtgacattgctaaaccgatgcagggcgcataaaatgcttta

SEQ ID NO: 51072 - DNA, 387 bp, Glycine max
  Clone ID: LIB3167-005-P1-K1-F6
acccgtccggctttaatggatcccaaccatcttgtgggtgaaacctaccccaatccaaggcctggcttttttcatgtccttttcaaggctgaacccttggcattttacattctctcggccctctttattgataactttgtcatcattttcgtggcgactgcacttcttgccgcccttgatttttgggtagtcaagaatgtcagtgggcgaatcttagttggattgatgtggtcgaatgaaatgaatgatctgggtgagagtgtttgaaactttgaatgtcttgaccacacattcattggctcgaatgaacacgaaggactcatggctgatcttgtggaccctgtatcttacatctattctgaagatagagctggctatattctcact

SEQ ID NO: 51073 - DNA, 139 bp, Glycine max
  Clone ID: LIB3167-005-P1-K1-F7
gtactttccaaacttaaaaatgtttaacgcctgtattaatccaacaaaaaatgggcctttgaaactaaagaaaaacaaactaagattggcccaaactgaagaaatacaaaaaaatggcttgagatcaagcctaaccacg

SEQ ID NO: 51074 - DNA, 387 bp, Glycine max
  Clone ID: LIB3167-005-P1-K1-F8
cccacgcgtccggtggattctgcatgactggagcgacgagcactgcgtcaagatcttgaagaactgcaggaaggcaataccagagaaaacagggaaagtgatcatcgttgatcacgtgctgcggcccgaaggcaacgaactcttcaccgacgttggcattgcatttgacatgatgcttctcgctcacaacgccggcggcaaagagaggacggaagagaactggaagtggctgttcaaagaaacaggtttcgcccgttacaacatcatcaagatcaacgctcttccttccatcattgaggcgtttccaatctaacgaagaggaagccactacacttcatgtgcgtggttttatgttgcatgtgttgttattattattaacagctatgt

SEQ ID NO: 51075 - DNA, 365 bp, Glycine max
  Clone ID: LIB3167-005-P1-K1-F9
cccacgcgtccggccatataatttttttttatttgaaataatgtccgggatcatccacaagattgaggagaccctccatgtgggagggcacaagaaagaggagcacaaaggagaacaccatggtgagcacaaaggtgaacacaaaggagaacaccatggtgagcacaaaggtgaacacaaaggagaacaacaccatggggagcacaaggagggacttgtggataagatcaaggacaagatccatggtgatggccatgacaagggtgagaaaaagaagaagaaggacaagaagaagaaggagcatggacatgaccatcatggtcatagcagcaccagtgacagcgattagatcttatatgttaagc

SEQ ID NO: 51076 - DNA, 391 bp, Glycine max
  Clone ID: LIB3167-005-P1-K1-G1
cccacgcgtccggcagtgtccgttacaacccctttatccttttggacaagctagaacaaagttcaaccacactaaaccaaattagctacccttttgggtaaagagagtcatggctggagcattaaaaaagtgcatgatgctgtgttgcacgagcaagattgtctcgaaggaagagatggcaggagaatcatacgaggaagccatcacgagtctgaccaagcttctcagtgagaaagctgagctcggtggcgttgccgccgcaaagataaaggagctgacggcggagcttgatgccgccggttcgaagccgtttaacccggaagagaggatcagaaccgggtttattcactttaagaatgagaaatttgagaaaaatccttatctatatggt

SEQ ID NO: 51077 - DNA, 387 bp, Glycine max
  unsure at all n locations
  Clone ID: LIB3167-005-P1-K1-G10
tccggaagtttcggttggggttaaaaaacgtaaaagggttcggggttctgttcgcgatgagagccaagtggaagaagaagcgtatgaggaggttgaagaggaagcgccgaaagatgagacagagatccaagtagtgcgttaaacctagtttgtttctgttgcttttacaattgcttatgttgtcgaatgggacacccagttgttagtggcactggtttctcctttttgatgtttgatacattttgttggattcaagtagtttatgttcgtcttatgttattagctcaaaacaatgttgttactgcttttgctaatcaacatgatctcctatttgcatcaaannnnnnataaannaaaataaaaaaaaatataaaattagtattaaaa

SEQ ID NO: 51078 - DNA, 391 bp, Glycine max
  Clone ID: LIB3167-005-P1-K1-G11
tccgtaaaaaattaccaaacaccacttttaaaacccaacaggttagaacaatgcatgagcattctacaatagctgagatttaataatgagcgagttccgcgggtttcgaaaactgagccacgccgcagaagcgtgtggctatgaagatcacggagattctgcacatggcaaacctccacacagacgatctaagagtgcttctgaaaggaacttggcaaatgcaagaggtggagcctcgcatccactcgagaaagaccacaatgaatgccttgtttcaacaccttcagtgggtgcttgtaggttacagagtccgtcttatgacaatctcacttgtgtaaacaagaatacctcttcaagtcatagagcatccttagaaaaagatgttgagcaa

SEQ ID NO: 51079 - DNA, 381 bp, Glycine max
  Clone ID: LIB3167-005-P1-K1-G12
cttttctcttctctgtctaaggggtgccctgagatcacattgaacaatggtgaaggctgtggccgttcttggcagcagtgagggtgtcactggaactattcacttcgttcaggagggaagtggtccaaccaccgtaactggatctcttgctggtcttaagcctggtctccatggtttccatgtccatgccttgggggacactaccaatggttgcctctcaactggatcacatttcaatcctaataacaaggagcatggtgcccctgaggatgagaatcgtcatgctggtgatcttgggaatgttaatgtcggtgatgatggtactgtcagcttcactattactgacagccagattcctctcactggaccaaacaacatcat

SEQ ID NO: 51080 - DNA, 344 bp, Glycine max
  Clone ID: LIB3167-005-P1-K1-G2
acaaaactggcaagggaaaaaccaaccccagggttggttggtaccggggttttgggtagcaagcatcctataagaattcaaaccatgactacgactgacactaaggatgttgctgggacagttgaacaggtgatgagaatagcagataaaggagctgatattgtacggataacagttcaagggaagaaagaagctgatgcttgttttgagattaaaaacacccttgttcagaaaaattacaacataccgttggtggctgatattcattttgctccctctgttgctttgcgggtagctgaatgctttgataagattcgtgtaaaccctggaaattttgctgatag

SEQ ID NO: 51081 - DNA, 388 bp, Glycine max
  Clone ID: LIB3167-005-P1-K1-G3
ggacagtgaaaaagactacgacatgcttcctaaagtagttgagttctctgaagagaatggacatggaggagaagacttatccaagaaggtagagctttcagccaatgaagagggactcaaacaaagcttacaggaagaaagtattcccttggatgacaagtatgaaaaaactgaatctcccaaacctgagaatgtgaatggaaaagtgaatgaagaagtgagcaaagaaaaagatgactcagtagaagccgaatttaaaatgtgggagagctgcaagatagagaaaaaggagttcttaccagagagagaaccagagcctgaatcctttgaagaggaagttgactcaaaaatagaaggtgctgagggctttgatcaagtaaatggaacc

SEQ ID NO: 51082 - DNA, 380 bp, Glycine max
  Clone ID: LIB3167-005-P1-K1-G4
cccacgcgtccggaaacctttcttttcaaaatggcctcaactacactaacaaccgtctccctccgcaacctctcttatcctacaccctcctcctcttcttaccctacgcacctctccgccaacccctcctccctccaattccccaacttctcccaccgcgccaccaccacgcgccgcgcccgcgtcgtcgtcgtctccgccgtcgaggcaccggagaaaatcaccaagctcggcgacgaaatcgcgggactcacgctcgaggaggccaagaacctcgtcgacttcctccaggacaagctcggcgtctccgcggcagcgttcgcccccgtggccgtcgccgcgggtgccgtcggcgccgtggcggacgctccggcggcggt

SEQ ID NO: 51083 - DNA, 382 bp, Glycine max
  Clone ID: LIB3167-005-P1-K1-G5
ggggtcaccaatgacttggccaaagtgagacaaattctcgattcctaccggcatccagccctccttattgttgatggagtgtcttctatttgtgctcttgatttccgcatggatgaatggggagttgatgtggcaataactggctctcagaaggccctttcccttcccactgggataggtattgtggttgcaggacctagagctattgaggcctcaaaacatgctaaatcacttcgagttttctttgactggaaagactacctgaaattctaccagctaggaacgtattggccatacactccttccatacatttgctgtatggtctgagagctgctcttgatctgatttttgaggaaggacttgaaaatgtgattgcaagac

SEQ ID NO: 51084 - DNA, 385 bp, Glycine max
  Clone ID: LIB3167-005-P1-K1-G6
cccacgcgtccgctaaattctctgtctacttcaccaagcacttttggttgcagctttggttaatttccaatatggtgtttcctctcctatctatctttgctttactcaatcttgcagtggtggcaacccatgcagaaaccttgccccctgaagtttactggaagtcgaagcttcccaccactccaatgccgaaagccattacagatatccttcacccagatttggcagaagacaaaagcacctctgtggccgtaggaaaggggggcgtaaacgttaacgcagggaaaacaaagccaggaggcacatcagtgaacgtaggaaaaggaggagtgaacgtgaacacagggaaaggaaagcccaacaaaggcacatcagtgaacgtagg

SEQ ID NO: 51085 - DNA, 385 bp, Glycine max
  Clone ID: LIB3167-005-P1-K1-G7
cccacgcgtccgaagaaaaaaaaatgattattcttggcttatgaaggaagaagagcctccaagcaaggaggaacgtgtctgaatctccatataaacaccgagatttcagagagaagcagaatcttatgctacctccttcgttaagttaaaggaattcagtttttgggcatggattttctctcatgtggatctggaccatgctgtcaagcagtggatatgaagtggaagttggttggcaaatgtttgaattcacgtcaagcaaggtttcccagtgttggaaatagaagcgggtcagtgagatttcatgacaataaggagctgcaaagagactttgggtctctgagtgctcttgaaaggtccaaaagaaccaattgcaaggcttata

SEQ ID NO: 51086 - DNA, 254 bp, Glycine max
  Clone ID: LIB3167-005-P1-K1-G8
catgaatgcaatatgcatagtgcatactgaggtgtaaggacatcttgaatggatgaataaagtgttttgcttttagctaaaacactgctttctgattgacttgcttttagattcatcatagctatatagttcagaggcaattttactcttgaaaacttttcattatgaattgatatgggttttgaagtgagcatgtggtacatatctatacttttttctttgtttgtttgaaagaaagaatttgataagtctgc

SEQ ID NO: 51087 - DNA, 379 bp, Glycine max
  Clone ID: LIB3167-005-P1-K1-G9
cccacgcgtccgaacaaccacatgccatggcaacagcgtcaatgtgtatgagcttcaacctggcaacagcattcaagggtctctctttatcttcttcttcatcgttcttcggtggaagtagtggttctctccgcgcgggtcctgcctcggtggtgtcgctgccccggcgctgcccgctgaccatagagaacgcgcacaagaagggggcgggcagcaccaagaacggccgcgactcgcagggcaagcgcctcggagtcaagatttacggcgaccaggtcgccaagcccggctccatcatcgttcgccagcgcggaaccaagttttatgcaagaaagaatgtggggcttggcaaaactataccattttcttcttgattgat

SEQ ID NO: 51088 - DNA, 385 bp, Glycine max
  Clone ID: LIB3167-005-P1-K1-H1
gttgaattgaaacttttggagagagtaaagaaaaaaaaaatcaatctgcattttggcattggggtcttgtttagtttgttccaatccaacgttggttgtgtgtgtttgtgttgggaggattgggattgggattggaatcagcgaccccatgagacctcagagaacgtcgatccacgccgtcacgacatgggtgaggcgacagcccccaaaggtgaaggcttttctcgccgtcgtttccggcatggcggccctcgtcctccttcgcttcatcgtccacgatcacgacaacctcttcgtcgctgccgaggctgtccactccctcggaatttccgtcctcatctacaagctcatgaaagagaggacatgtgctgggttatcactcaaa

SEQ ID NO: 51089 - DNA, 359 bp, Glycine max
  Clone ID: LIB3167-005-P1-K1-H10
tcctaattttgataagaagaacgacccaaaggcacgggccttgaagactgctaaggcagttaagtctggtgctacctttaagaagaaggcaaagaagatccgaacttctgtcactttccacagaccgaggacattgaagaaggataggaaccccaagtaccctcgcattagcgcgcctccaagaaataagcttgatcattatcagatcctgaaataccctctgaccactgaatccgccatgaagaagattgaggacaacaacactttggttttcattgtcgacctgcgtgccgacaagaagaagatcaaggatgccgtgaagaaaatgtattacatccaggccaagaaagttaacacct

SEQ ID NO: 51090 - DNA, 389 bp, Glycine max
  unsure at all n locations
  Clone ID: LIB3167-005-P1-K1-H11
gtccgaagtaatgcaaaaaacgtgggggacttggaaatccccattggctgttaaccaaggagccgacataatatatagcgacacaccggggactgacactgtagcggcccataacaacagcaatagggagggtgctgtntaacatgtgagaaaccggaactaaaccagatgaaccgaatgcgcaggactaaaggcatgaccattgcattgaagctgggcaacttggatgggttggcagctgcgccgcatgcgtgggcggcggattctgaagctgcggctgctgcgagcgacaacaggggacagcttctgctgtttgtggttacgccggctattgcttgggtgctttacaacatattgcagcctgctgtgaaccagctcaacaggatgag

SEQ ID NO: 51091 - DNA, 329 bp, Glycine max
  Clone ID: LIB3167-005-P1-K1-H2
aaattggcttatttaacaatgccaggttcattccttggttgcccagccgtaaccaaccggtcggaagcggcgacgcaaaggaaatcagtggtagtgaatgcagccagcaaatctgttgaaggggaaaaggtcagttatgacaacaatggtagcaatgcaaggaggaacttgatgttcgccacggcggcggctgctgtttgctcttttgctgcaaggatggcattggcagatgagcctaaaccaggaacctcagaagccaagaaaaagtatgccccggtttgtgtcaccaatcctacagctaggatttgtcgcaattgaagaactttttt

SEQ ID NO: 51092 - DNA, 291 bp, Glycine max
  Clone ID: LIB3167-005-P1-K1-H3
taagttcaaggacaacgtcactccaaagcggattgaaaagctcatcaaggactatgccaatctggtcaatctcatcccacccatgaagtcattccattggggcaaggatgtaagtgctgaaaacctgcatcaaggcttcactcatgtctttgaatcaacctttgagagtccagaaggcgttgcagagtatgtagctcatcctgcccatgttgaatatgcaaatttgttcctttcctgcttggagaaagtcattgtgattgactataagcctaccgttgttaagctttgatt

SEQ ID NO: 51093 - DNA, 385 bp, Glycine max
  Clone ID: LIB3167-005-P1-K1-H5
cccacgcgtccgcccacgcgtccgataaatttaagtgaggagctagagaatgatgatgaagtctgctatgtgtgcagtggtggttgtagcacttcttcttctggcggaggtggggcccatggctgaggctgtgacatgcaccccaacagagttgagtccgtgtcttccagcaatcacttccggtgctaaaccttccaatgcttgttgcacgaagctgaagcagcaaaaaccatgcttatgtggctacctcaaaaacgctagcttgaagcagtatgttaactctcctaatgcccgaaaaaccgttgcttcttgtgggattccctttccaacttgttaattaattaagccttcttataattaaagtgtgggatatatatatatatat

SEQ ID NO: 51094 - DNA, 376 bp, Glycine max
  Clone ID: LIB3167-005-P1-K1-H6
tcgcccacgcgtccgctcttctcttcccaaactctcttcttctattccaaagaccctgttgaagtaatcgatggagtttcagtctctttccagattctaccttcttctttccttaaccattctcttccttgcaccctttcacgctcaagctaaaattaaagtcacttactgcgataagaaggcagactatcctgtgaaggtgtctggagttgaaatatcaccagaccctgtggagagtggcaagcctgctacctttaagatctcggctacttctagtaaagctatttatggtggagaagttgtaattggagtttcatacgttggggtgcctgtccatactgaaagaattgatctctgtcatgaagtatcctgtcct

SEQ ID NO: 51095 - DNA, 320 bp, Glycine max
  Clone ID: LIB3167-005-P1-K1-H7
gagagagagagagagagagagagatgcgcgaaaatgagcggagcgaaggggaggaagaagggagcgagctttgtgatcgattgcgcgaagccggtggaggataaaattatggacattgcttctctggagaagttccttcaggagaggattaaggttggcggcaaggccggtgcactcggcgattccattactgtcactagggacaagagcaagatcaccgttaccttcgacagcaacttcttttaacggtatctgaaatatttgaccaagaagtactttgaaaagcacaatgggagggattggcttcgcgtgattgcatt

SEQ ID NO: 51096 - DNA, 362 bp, Glycine max
  Clone ID: LIB3167-005-P1-K1-H8
agcggatgagaattgagtgaggaaagcgagtcttcttggaaacatttttctttcattttccgttagtgttgtggctatggagtcggcattgatatttctgggaacgggagtttcgggaacggttccctccatgaggtgcctcatcgacccttcagatcctccatgtctcgtctgcactcaatctctctccctcccacctcacctaaaccctaactacaggtgcaatacctctctgttaatcgattattactctcaaagcgacgccactcacaaatatatattgatcgacgctggcaagacctttagggagactgtacttaggtggtttgttttccatcacattccaagaaatgattctattc

SEQ ID NO: 51097 - DNA, 340 bp, Glycine max
  Clone ID: LIB3167-005-P1-K1-H9
cccacgcgtccgccggtaattgagggtgctgttcaccacattgcctcaagaagatttgagtttggaggtactgacctaactaatttcctggctctagaacttggcaagtccaatccacaagtaaatatcagcatgtctgatgtggagaaaataaaagagctgtactcatgctgtgctgaagatgaattagcttatcagaagaccggatattcttgtcctgtggagaagcacacccttcctgatggacaggtaataacaattgggagagaaagatatactgttggggaagctttattccagccatgtctactgggtttagaggctcattgcattgttgatc

SEQ ID NO: 51098 - DNA, 377 bp, Glycine max
  Clone ID: LIB3167-006-P1-K1-A1
gaagaaactagagagaaggaagcggttaaagaaaaagaatcaggcatttgggtaggcttctgtttgtgtttatgtggtggtgctaatctaagaatcatcctgaggccaatcttggtattgacatgcagcattaattctgttgtgaagatctcaatcaaatcctcaaggcatagtagaaaatagtgcatagcaaagcaagtgcttgtaaaattgtttgttgtcttttcctttcttttattattttattattattattattttctgttggtattgtcttcttggagttcagtgttttcatttttctttcagcagttataataggtgcacttttttgtaatattattaccctacttgtgggagcttcacttttagaattg

SEQ ID NO: 51099 - DNA, 376 bp, Glycine max
  Clone ID: LIB3167-006-P1-K1-A11
cccacgcgtccgaacctttccttcttgcagagtgagcgagcaagctaatatggcaatcccacaccaatggcatgctcagccacctctgcttccctcttctccgcaaacccaacacccctcttctctcccaaaccctctctctccctccaccttaaccctctccccacgcgcccttctccctccctcacgcgcccttctctctccctcacgcgcccttctcactctcgccgctccttcgttgtcaaagcctcctccagcgagcttccgctggttggtaacaccgcaccggatttcgaagcagaggctgtgtttgaccaggagattatcaacgtgaaactatctgattacattgggaagaaatatgttgcgctcttct

SEQ ID NO: 51100 - DNA, 381 bp, Glycine max
  Clone ID: LIB3167-006-P1-K1-A2
gaaagacccggggcgacgaccccgtcgtacattaataatcggagggtgggggacagtctaacaatgacgatggtggcgatggaagcaataatgatttttatgaagataacaataattattggaacagcattctcaacttagtgaattcttccccttctcatccccctatgttctaatgtttgttgggaatggatcatcccaggttgaattttcacctaattttgtgaggtgaaaattttgtgtttatctctagcttcataagtgtttacaaaaattttatagggctaagcttattttatgcctaagaagaaagagataaatgcaatttcacgtgaacaaggtgaagtgaaaattcaaaatacaacaggatttatttgcgtg

SEQ ID NO: 51101 - DNA, 378 bp, Glycine max
  Clone ID: LIB3167-006-P1-K1-A3
gattatcattgcagggaacctcaacccatattttagtctttttaattttaattatgattattattatttctgccacaactttaggggtgcattgcaaatggcttccgttgttgcaagcttgccgccaccattgctgctccctgctagaaaatcacatatgggcaacttcccaagttcccctgtttctcttctttcagagattattggggctgtttcgctctcaggaaacttatccaagggggttatgaaaaactcaatttcagatttctctatgctcagggcctttcatatctctggccatctcttcaaggctccccgtatcctccaaatctcttggcatcctcccttggcaggctggtgtaaatgttataccgaccg

SEQ ID NO: 51102 - DNA, 366 bp, Glycine max
  unsure at all n locations
  Clone ID: LIB3167-006-P1-K1-A4
atcataaaccccctccagagaacaagaatcaaagaatggcaactatgactggtgtgagcctttcaagccccagggttttcttcaacgcatcaccctcaccgcaaaactgtacacttagtatatgcaatttattggtcgcccattgcatgctttgttagactagcaacaatacttaccagtattacgttgggtttgttggagtaaacttcaatggtgatgattatacttcttttatttgtagcaactgtaatacgaattttggggatttgcataaatatttgttttttcaatggannanannnnaannnaaaaaaaaaaataaaaaaaaaaaaaaaaaaaaaaaattaaaaaatataataaatttaa

SEQ ID NO: 51103 - DNA, 380 bp, Glycine max
  Clone ID: LIB3167-006-P1-K1-A5
ctggcttctttccctcaagggtgtttctactctacagcagttggaggattgagatgctatgagaatccaaagaataagattactgcaatacctgctgaggaagaggaaatctggggtgcattcttcaaggtggaagggtcagcagtccttgcaggcacagagtaaaagatccattttcaaataaagtaccgtgtgatgtattaatggagtaatgtgtttatgtgcttgtgacggtaaggcttgcatgcggggccatgtaaatacctttaatgataactatgagaagaatgtgactggtagtagagtttatcatggtgttcattagctaggattttctctgtttctcttgtacagttgcgctttctaatgtaataaaagat

SEQ ID NO: 51104 - DNA, 374 bp, Glycine max
  Clone ID: LIB3167-006-P1-K1-A6
agccttccggttgtcagtataacgattgataaatcttaccaaacaccacgagtatggcttactgggaatgatgagtcgagaatgcttaagcaaccagaactcgctcttgaagatgttagtcaaagatcatgcacacaaaacggcaacaattgaggaccatccttacttgccagggaagcatgcatctattcatacatgtccacatggagcagtgatgaagaaaatcattgatgcgttgatgtcacacggagttgagcctgaagtagacaagtacctattcttattcctaaaatttatggcttctgtaatcccaacaattgagtatgattgtaccatggacattgatcttggtagctacagccattgactaagat

SEQ ID NO: 51105 - DNA, 339 bp, Glycine max
  unsure at all n locations
  Clone ID: LIB3167-006-P1-K1-A7
aaactaaccaactatacttcatacaaatgcgattctttcttcatttataacctaattttcttttcgatccaaaagatggctctctcgcgcgttgttgctcaatcgtcgcagtcgaatcttctgaaacccctagcgtcgtacttatcactacgacgccgatcggtttcgacttcgtcagacccactcacgatagaggcctcggtgcccttgaccttccacaactgcgacgcgccgtcacgcgccgtggagacctnctcggggagctctttgcgtacttcacgacatggcgctgattccgccgatggagatcggggcggactctctctacaaggcgaagct

SEQ ID NO: 51106 - DNA, 376 bp, Glycine max
  Clone ID: LIB3167-006-P1-K1-A8
gtgggagggagtgctactgatactgaaattgaaatgctcaaactgtattcctactggataagctcctgttccttccgagtccgatttgctctcaacctcaaagatcaattcaatttcctcttttacccgtgttcagagtttcttaagctcaaccccattggatttgttcccgtgcttgtcgatggagattcagtaattgttgactctcttgccattattatgtatttggaagataagtatcctgaccctcctctgcttcctcgtgatattcaccaaagagccatcaatttccaagctgccactattgtttcctcatctatacagccttttcaaaattatactgtagtgcactcgaaaaattgttgaaagaccatgc

SEQ ID NO: 51107 - DNA, 379 bp, Glycine max
  Clone ID: LIB3167-006-P1-K1-A9
gagataactagagacagagagattaaaatgaaggtacttgaatactacgttgctacaattttggtagcatggcaatgccatgcgtacgatatgatccctctgcgaatgaacactgactatggtgcccgtactgcagacgtgaaatgcgcaagttggatgctagctgaagaagcacacaacatctctggctttgagaccatacctgaagagtgcgttgaagcaacaaacgaatacatgcatggcgaacaatatagatcagactccaaaacagctaaccaacaagcttacttttatgcctgagacctcggagttcattccaaggacacatttgtgtatagcatacatggcaccgtactctctaatattccatactacaaaa

SEQ ID NO: 51108 - DNA, 382 bp, Glycine max
  Clone ID: LIB3167-006-P1-K1-B1
tgggttctttggcaaagaagggactcaacaattacgtcaaacagctccagcaacaccctttgagaaccaaggtaatcactgcaggggtactatcagcgatcagcgatgttgtgtctcagaaacttaccgggatacagaaaattcaactcaaacgacttcttttcaaagtgatttttggagccgcttatcttggaccctttggacacttttttcatttaatactggataaaattttcaaaggaaagagagattcaaaaactgtggctaagaaggttctgattgaacagttaacatccaatccttggaacaatttgcttttcatgatttactacggattagttgttgaaggacaaccttgggtgaatgtgaaagctaaagttaa

SEQ ID NO: 51109 - DNA, 244 bp, Glycine max
  Clone ID: LIB3167-006-P1-K1-B11
accaggcgttcgaatcaatggcaaaggggttgattctgttgatgacacacaagaacatttgaagagtgaccaacaagacgaggttgtgtgcacagggtaagaagcatgcactgaatacattaaatgcttcttggccgcaggtacatattagagaactgcacgctgatgtgcaagaaagcggtaatataatcaactcaaacaccatgtgatcataagctacaaagtgagtgtcactgcacttatg

SEQ ID NO: 51110 - DNA, 372 bp, Glycine max
  Clone ID: LIB3167-006-P1-K1-B12
cccacgcgtccgaatttctatcttcttcaccttgctctcaccttctgggtaatgtttgaaacttggtgttagctgagctgtttgacaaaaatgaatattgcacaagttacagcatggcagcctgggatttgtgtgaaaaatatgtctcagttgcaccggcttcaatctaaaccatgtgttataccaaagagttttggtcctctcacttgtgttctactgagcttaagagcaagacaatcgtttagctcgaaatgttggcccattttacaatctcggaaacctcttcatatttgcttagccggtggaaaagggatgatgggaaatgatgagaattccccatggaaatctattgagaaagctattggaaaattt

SEQ ID NO: 51111 - DNA, 391 bp, Glycine max
  Clone ID: LIB3167-006-P1-K1-B2
agccttccgaaaagccatggccacctccaacttctttattgttctctccgtctccctagccttctttttggtgctacttaccaaggcacactcgaccgataccgtttctttcaccttcaacaagttcaacccagtccaaccaaacattatgctccaaaaagatgctagtatttcatcctctggggtgttacaactcaccaaagttggcagcaacggcgtgcccacctcgggatctctcggtcgtgccctttacgctgccccaatccagatttgggacagcgaaaccggcaaggtagccagctgggctacatcctttaaattcaacattttcgcacccaacaaatcaaactcagctgacgggcttgccttcttcttggcacccgtcgggtct

SEQ ID NO: 51112 - DNA, 388 bp, Glycine max
  Clone ID: LIB3167-006-P1-K1-B4
agccttccgttttgaacgcgctggttcgtcttcctttctcgaattcacgcttccacgacgatgctgctccgatgattattaggcactctctgttttcgagccgaaagcaacagcagcagcagcagagttataaggttccacagcgtcatcaagtgttcgtggttgaagccaagggcaaaaagggaatgatgtctcgtcaatttcagcgcaatgctcctcctcctttacccaagattgaagacgatggcaatcccaaattcgtcatcttcattcgcatggccaatgtatacctttggtaccctcttagtatcgtatcaggcggcaccactgctaaaataatggttgcagctaaagataattttctcggcaagtatatctacaaagacac

SEQ ID NO: 51113 - DNA, 379 bp, Glycine max
  Clone ID: LIB3167-006-P1-K1-B5
tcgaatcttaaccccggacccttagaacctttccgaaattgacacccaccttcgcaaccgtcgcaggactcggtggcgcattactgtcatccacctcatctcgtctcacctcagggtttgtgaaatccccagtgattgctaggaatcccttgaggcaagctgtggcaatgggaaatgggaggattacatgctttgagaggaattggctgcgggcagattacagtgtgattgggtttgggttgattggttggctagcaccctcaagcataccggctatcaacggtaaaagtctgactggcctcttctttgagagcattggtgctgagcttgctcactttcccagccctcctgcccttacttcgtccttttggttatggct

SEQ ID NO: 51114 - DNA, 370 bp, Glycine max
  Clone ID: LIB3167-006-P1-K1-B6
agccttcgggaccaggtgaacttccaaccggtccttaatgttcggcggtctcgcgagcggtgaaacgcgcatcaccggccttctggaaggcgaggacgtcatcaatacgggcaaggccatgcaggccatgggcgccaggatccgtaaggaaggcgacacctggatcatcgatggcgtcggcaatggcggcctcctggcgcctgaggcgccgctcgatttcggcaatgccgccacgggctgccgcctgaccatgggcctcgtcggggtctacgatttcgacagcaccttcatcggcgacgcctcgctcacaaagcgcccgatgggccgcgtgttgaacccgctgcgcgaaatgggcgtgcaggtgaaatcg

SEQ ID NO: 51115 - DNA, 375 bp, Glycine max
  Clone ID: LIB3167-006-P1-K1-B7
cggacgcgtgggaacaaaacaaaacagtaagctaagcttcactgccatgcctgcaacgccattctcgtgttcgttcctcactcttcaaccgcgcttcaactcctacgttaaccccatcttccgttcactcaccttccaactctcttcttcgccgctcccattcaatgccaacttctccagcgtcagactccactcttcgctctcgcgagcggcggagaccgattctccgaccggcggaaggtccggcgcgctaactcccggtcccgccgtcgccggtgaagttcaaaagatcgacgtgaatcctcccaaggggacgcgcgacttcccgcccgaggacatgcgcttgcgcaacttgctcttcaatcatttcaaaga

SEQ ID NO: 51116 - DNA, 371 bp, Glycine max
  Clone ID: LIB3167-006-P1-K1-B9
tgatgaggaaaagaaggtagtgtcgtacactatcattgatggggaactcctccagcactacaaaacattcaagggagacatttcagtgactccaattggcgatggatgcgaggtgaagtggagtgctgcgtacgaaaaggttagccatgatatttctgatccaacccttgtcaaagattttgcagtcaagaatttcctagaggtcgatgcctatgttcaagccaacgcatagagaggttctattctatgcatgcctcttaattaataatggctaatgttttaatctgtgcatgtattatggactattattaaataatatggttgtacttgtaccataccttatctaatataatgttgcagtatcatgtgtc

SEQ ID NO: 51117 - DNA, 376 bp, Glycine max
  Clone ID: LIB3167-006-P1-K1-C1
accgatcaaaaacctggtcctgtgcctttcttcgctgctggaatcagctccgttttacacccaaagaacccgtttgcccctaccctacatttcaactatcgctattttgaaaccgatgctcctaaagatgctcctggagcacctagacaatggtggtttggtgggggaactgacttgacaccagcttacatttttgaggaggatgttaagcacttccattcaattcaaaaacaagcctgtgacaagtttgaacctactttttacccccgattcaagaaatggtgtgatgattacttttatatcaagcatcgaggtgaaaggagagggcttggaggaatattttttgatgatcttaatgactatgatcaggagatgc

SEQ ID NO: 51118 - DNA, 364 bp, Glycine max
  Clone ID: LIB3167-006-P1-K1-C12
gcgatatcatgtacctattggcaattttattaggccacaaatattgctgaaactctgaacctataatttgacactgggttttggctatttgggagattattaattgtgccaactgcatggcaaggatttcattaggggattataaattgactgttttgcccctgaaggattcggactattaccagcgatgtcaactggtgatgattcagttcgcttgttttatcttgataaaccactacgggaaggagcatctagggcgggggtttgtgggtattatttatcttgagaaaaaatccacacagttgtattccattttgtttcacttaagataagataatgcgccaattaatttagcgatatgctt

SEQ ID NO: 51119 - DNA, 378 bp, Glycine max
  Clone ID: LIB3167-006-P1-K1-C2
tcggttttaaacacacacacacacactagaatcaaaatgagaaccatccccaccacaacaacaactccaatagcacccgcagccaccaccataagtccttattctcagcactcgacgtggcactctccggttccgtatctgtttggaggactggctgcgatgctcggtctcatagcctttgctctcttgatcttagcctgctcctactggaaactttccggccagttactgaacgaagaaaacgccgaaagggacttggaaagtgttgctggtgagaaacagggtgactctgcaaacaaggactctgttaaggtgtacgaggagaagattctcgtcattatggccggagatgacaaacccacattcttggccaccccg

SEQ ID NO: 51120 - DNA, 325 bp, Glycine max
  Clone ID: LIB3167-006-P1-K1-C3
cccacgcgttcgaaaaaaaaaaaatttttttaaaaaaaaaaaaaaaaaaaaaaaaaaggaaataataatataaaaaaaaaaattaattataattttatataaaaattaaaaatttattaaaaatttttatatttatattatttatataatataaaaatttattaaaatggggggggccttttttaaagattaaattttttttccccgtttttttcaaaatttaattttttttttttttcccccaaatttaatttcatgtcccttctttttttaatctttttcttttaaaaaccttttttttcccaaattttatttctttttaata

SEQ ID NO: 51121 - DNA, 365 bp, Glycine max
  Clone ID: LIB3167-006-P1-K1-C4
gccaatcgtccgaaagcctaaggtatatttaaacgctgattgaatcattcatgtacgggcattgacaattattatatagttcaccaaaacaaagtgatcttccaaatgtacttactaataaaaaaaaaaaaataaataaatatattttttaatttaaaaaatataaattattttaaataaatattcatttctttaattataaaattttatattgttctgtctttttaaatgatccaattctttttattttcttatatttcttttttattttttttttttattttatatatttattatggggggctggtttctttatttttataatgttatttttcttttttataaaattcttttttttttataat

SEQ ID NO: 51122 - DNA, 382 bp, Glycine max
  Clone ID: LIB3167-006-P1-K1-C5
agccttcggcaaggaaaaacctttttaaactaaactgattccaggatgatggaatgcacgatcttgacatagttgaatggaaaaagaaaagaaaattacagagtgatcagttggatttgattagacctaaacataaatgctgggttggaagtttctcctctgaacatgcttcagtgtttgataaaaatccagttttagagagcatgcacaaccacacagttgaaagctccaaacatgaatctgccaaagacagcaatagttttatggaagactgtgatactgccatgtctgtaaatgaagaagccaaacacgagacagattgtggaagttcatacttatatggtaggccttccacttctctggttaattgggaatgactata

SEQ ID NO: 51123 - DNA, 386 bp, Glycine max
  Clone ID: LIB3167-006-P1-K1-C6
agccttccgccacacccttccgattcctcctcctatatatttggccaaaatctatcctatctcttggcatattctttcttatcatcatcttcttctctcttgcctccagaattgaaaagttcttcctctgcccatagtctttgacacccttttccaatctctagtttttttattttcttccctctataattatctccttcacaaaccttctatccctcataacatcaattaccacaaacccaagccttgtacctctcaaagtttgattcttttctcttgcccaaagcgatttggattgctataatttttgttcgtactacatgttatgcagtcatgaatgattgagagacaacacaaatgtcttccccagtgatcagcgagatcct

SEQ ID NO: 51124 - DNA, 377 bp, Glycine max
  unsure at all n locations
  Clone ID: LIB3167-006-P1-K1-C7
cccacgcgtccgatcataatctcaatcacctcaatttcacttctctgctccaaagtttcaatcttttctctgaaatcccaaatgggcatcgccacaatcaaaatgggaggcaactccgactccaactgttccatcactccacgccattacaacacccacaaggtgttccttttctgcaactacattctcttgggtgcagcctccagctgcatcttcctcaccctctccctgcgcctcattccctctctatgcggcttcttcttcatccttcttcaggtctttacgattgcgggtgcagtctcggggtgtgctgctgtggnggctaataggtggtactctgcacacatggtggccactgttctaacggctatttttca

SEQ ID NO: 51125 - DNA, 379 bp, Glycine max
  Clone ID: LIB3167-006-P1-K1-C8
attttggcatcgaggttgaatctcatcggagagagaaaaaccataaccatgtctggaagaggaaagggaggcaagggtctcggaaagggaggagcgaaacgacaccgtaaggttctgagggataacattcagggcataacgaagcccgcaattcgccgtctcgcgagacgtggcggcgtgaagcgtatcagtggtctcatctacgaagaaacccgcggtgttctcaagatcttcctcgagaacgtcattcgcgacgctgtcacctacactgagcacgctcgccgcaagaccgtcactgccatggacgttgtttacgccctcaagaggcagggcaggaccctctacggtttcggcggttagagaattaccgatttctgca

SEQ ID NO: 51126 - DNA, 343 bp, Glycine max
  Clone ID: LIB3167-006-P1-K1-D1
cccacgcgtccggatattttccctaccccatacgttttgggggcgctttaattattctattctagttttcatttgttacatgtacttaaatttgtgttaataaattaaaattccactcaatttacactttaaaaaaaaaaaaaaaaaaaaaaaaaaaaaaaaaaaaaaaaataaaaaaaaaaaaaaaaaaaaaaaaaaaaaaaaataaaattaataaataaaataaattttaaaaaaatttttatattaatatatattataaaaattttaaaaataattggggggggccctttagaggatacaaatttttttcccggtttttttgtaaatatataactttttt

SEQ ID NO: 51127 - DNA, 374 bp, Glycine max
  Clone ID: LIB3167-006-P1-K1-D10
gaacaaacaaagcaaccctatgtctaaggtggtttgtgtcaccggagccagtggcgccattggatcatgggtggccctcctcctcctccagcgtggttatacggtccatgccaccgtccaagacatcaaggatgaaaatgagacgaaacatttggaggaaatggaaggagcaaagagtcgtctccatttttttgaaatggatcttcttgacatcgactccattgccgctgccataaagggttgctccggcgtaatccacctcgcatgtcctaacatcatcggtcatgtcgaagatcctgagaagcagatactggagccggcgataaaaggaacagttaatgtgttgaaggcggcgaatgaagcgggggtggagc

SEQ ID NO: 51128 - DNA, 374 bp, Glycine max
  Clone ID: LIB3167-006-P1-K1-D11
gaaggaacgtgtgttcgtttgttctttggtgaattcctatccacacgtctcaccggaaacatgtcagcggtggttgctggttcctcctcttcattctatgccaccttcacccccataaggagcccctccttaaaaaactctcaactctctcattccaaggcactcacttcacctcaatgccagaaaacatctttacaagggctctcacttcatgaagccaaaaggggtgtttcagaatcctttctagttgagaacaacaatggttcctccattgctggaaggagactggagatcacaacacgaactgctggggcttcaaagacaattgaggtggaggttgacaagccacttggcctcaccttaggccaaaagtc

SEQ ID NO: 51129 - DNA, 372 bp, Glycine max
  Clone ID: LIB3167-006-P1-K1-D12
cattttgcatgtgttgctaccaaaactagtcgatgggatccatcgtatggccgtatgtctggatctgattacttcaatagcatgcattatggtgcaggggatgattctgcagcagaaagtgaatatgtaagtggtttctgcatagaaagaaagattgatttaacaagtcacatcaaatggtggggatctaataagagtagacattctgatgctgggacaagattatcagaagaaaagaaacttggttctgctggagatatttgcattgaaattaagcaattggagcagaaagttcaacctacagcaccttaccagatgccacagttaggaaggccccaaaatgagaaaaagcatagaagttcttcagtttct

SEQ ID NO: 51130 - DNA, 363 bp, Glycine max
  unsure at all n locations
  Clone ID: LIB3167-006-P1-K1-D2
cttccgattcttggccacctgttttttccgttttggtggctgcgcgattcttttgacgaacaaaagatcgttgaaggacaaagccatgctgaggttaaagtgtttggtgagaacgcatcacggtgctagagaagaagcttatggttgctgtatccagcangaagacgttgaaggaaggcttgngtttcatcttgngaagactcttcccaaggctgccacccgagccttcgtttgataatcttcgggtcatagcacctaagatattacctatccgtgagcttctgaggtttatgttcgcctcccttgttaaaaaaatcaacaagaatactaacgctcccaagtccgtcgcgagcaccggagcga

SEQ ID NO: 51131 - DNA, 266 bp, Glycine max
  Clone ID: LIB3167-006-P1-K1-D3
cccacgcgtccgcgccgcagtaccaattttcctctttcttttgtgtgtaatgtgggggaccacttcgttttgcaaaaacaaattttgaaacctcatatatgcgttagcgttaccctctgaagtctgaactgaacacgatctcagagagaacccctgcttcttaactacgctcgtttgcaagcatcaatggagaaaggaaagggagtgattgtatcctgtggtattaagttttatttttttcttttttccctattttcttttttttt

SEQ ID NO: 51132 - DNA, 376 bp, Glycine max
  unsure at all n locations
  Clone ID: LIB3167-006-P1-K1-D4
agagtttgttgtgagctataagctagtttatcgtgaggagaatatgaagttgtttgttttctttgctgctgcagtagttttggtagcatggccatgccatggcgcangctaccaaaggttccctctccgaatgaaaactggctatggtgagcgttcttcggaggtaaaatgcgcaagttttaggcttgctgtggaagcacacaacatccgagcctttaaaaccattcctgaagagtgcgttgaaccaacaaaggactacattaatggcgaacaatttagatcagactctaaaacagttaaccaacaagctttcttttatgctagtgaacgcgaagtccatcacaacgacatatttatattcggcatagataacacc

SEQ ID NO: 51133 - DNA, 380 bp, Glycine max
  Clone ID: LIB3167-006-P1-K1-D5
tcgcccacacccttccgaaaggaaggaagttttttccttccgaattgaggaagggaaaggtgtcttggatggccaagtcatcttccttagctatcacgttgatctgcgccgccacggtattggtggcgatgagtcggtggccgacagccgtgggcggcggggaccaccacttgggaatgggatgggtttccagcacgtgcaaggggaccattgctgagtgcctgggaggggaggagtacgagttggattcggagatcaaccggcgcatcttagccaccaacaagtacatcagctacgttgcgctgcagaggaacactgctccctgctctcgccgcggcgcctcctactacaattgccgacccggagcacaggccaatcct

SEQ ID NO: 51134 - DNA, 374 bp, Glycine max
  Clone ID: LIB3167-006-P1-K1-D6
cttcgggttgggccggtggtggattaacattaaacattacattacattacctgccgactggtttacgctatcagcaatagcaagtcggtcgctcagacacgcacagatctgatctgatctgatctatctgaagccgaaaacgccgacggtgatgatgaagatggggtgttcacgttgctccttcttcctcttcctcatcctcttagtggcgctctttccctcgtcgctctccgagatccgcttctccgagatccgaaacgacgatcgccgcatcatccccttcgatcagtttggattcacccacaagggtcgccttgagctcagcgtttccaaaatctcactctccaattccaatttggacctctcgaaggtcg

SEQ ID NO: 51135 - DNA, 375 bp, Glycine max
  Clone ID: LIB3167-006-P1-K1-D7
aaccaaactcaaaaccctaacaaaccaaaaacagttgctgccatattcaccaatggctttctccaaggcaatgtttctcgccgccgtaatgtcggtgctcgtcgccgtcatctccgccgccgaagctccagctccgagccctacgtctcccgccgccgccgtttcgccgtccttcgtcgccggtgttctcgccgccggagccgctcttgcgttcggatctgctctgcggatctgaacgtagctcatggattttctcgtttacatgcgtggatttttagtagaagcggagatttgagcagcattagtatataactctctctctctctctcccttcctctctctctatatatattgatattgctatgtagagattat

SEQ ID NO: 51136 - DNA, 361 bp, Glycine max
  Clone ID: LIB3167-006-P1-K1-D8
caaaaaaaaatctcaaaataaaacatccaaaccacacacctcacaccctcttcaacatcctcagcaagaagaagaagaagaagaaacaatgtcttgctccaatctgacaatgttggtgtcctcaaaaccttccctttccgacccctcgaacctctccttccgctctgtcctgaacccttttcagctccctacacaaaacccagcttcatgcaccccttcacgctcctcaagcacccaaattcagtgtggtctgagagaactgagaacccgcattgagtctgtgaagaacacgcagaaaatcacggaagcaatgaagcttgttgctgcagccaaagtgagaagagctcaagaagcttgtgtg

SEQ ID NO: 51137 - DNA, 341 bp, Glycine max
  Clone ID: LIB3167-006-P1-K1-D9
cccacgcgtccgcccacgcgtccgcccacgcgtccgattctcctcatcttcctctttttctcaacaaaaaggggttcaattctagctagttctattacgtcgtccgcgaccatgaacatggcgatcgcgcttctgttcatggttttcgcagtttcatcagctttagacatgtcaataatatcacacgacaacgctcatgcggatagggccacgaggcgcaccgacgaggaggtgatgtcaatgttcgaggagtggctggtgaaacacgacaaggtgtacaacgcgctcggtgagaaagagaagaggtttcaaatcttcaagcacaatctgcgcattatcga

SEQ ID NO: 51138 - DNA, 368 bp, Glycine max
  Clone ID: LIB3167-006-P1-K1-E1
ggaatgtggaatataaggtccgagaattggggaaggcagtacttgggacaacaattgtatctgagggtgtatacaccttccaagtcatggagggatgaatatccggtcccaaagaatgcgcttctatgtggcagggcaagtggtcgtcgcacaaggcctttctaatttcatgtcacgagagggtggcatattcatattgtgactgcttctgttttttagcatatgtgcaggaaattttactatcatagctcgccctgagcttcgagtaattgattttattttttaacggatgaagtatctcatgcatttgtagtaactatgatcttccaagttccatcattttcacgtattaattacttattaattaa

SEQ ID NO: 51139 - DNA, 376 bp, Glycine max
  Clone ID: LIB3167-006-P1-K1-E11
cttcatcacttcattcaacatttctccccttagcttgtttcaccaatggctgctgcggttagtgctgcagtctcttttccatccaccaagtctacctctcttccaagcaggacctccctcattgccccagagagagttgtgttcaagaaggcttcattgcaaaacagagatgtttctagcagtggacgggtagtttccatcagagctcaagtcaccactgaggcaccagccaaggttgaaaaagagtccaagaaacaggatgaaggtgtggttgtgaacaagtttaaacccaagaccccttacattggtagatgcctgctcaacacaaagatcactggggatgatgctccaggagaaacttggcacatggtcttca

SEQ ID NO: 51140 - DNA, 385 bp, Glycine max
  Clone ID: LIB3167-006-P1-K1-E2
agccttccgttttttccaaactttaaaaatttttagttccacaaaaccaaaccaaaatggcagcagcctcggcctcatccaccatgatatcaacaccagccttatctccaagcacaagcatccaaaagcaccatcatttgaagccatccaacgtgtgctttcaaggccttagacccctcacaaggttcacaaccaaagtgagcagcaccaccaaaagggttattccaaagggtggtgtcggtgttagagctgaactcaactcagcacttgtcataagcctcagcactgggctctccctcttcttggggaggtttgtgttcttcaacttccaaagggagaacgtggcaaagcaagtgcctgagcagaacggactcacacactttga

SEQ ID NO: 51141 - DNA, 381 bp, Glycine max
  Clone ID: LIB3167-006-P1-K1-E3
ttagaacctgatgttatcttgaaacatttcgaagaaggtcctaaaatcaggcgtgttggtttcttttcttctggtccacctcccagaagccacagtgagattcaagatgaaggaggcaacaacattggggaaatcaccagtggtggattcagtccttgcctccagaagaacatagccatgggatatgtgaaatctggattgcacaaggcaggcaccaaagtaaagattattattcgaggaaaacccaatgaaggagtccttacaaaaatgccatttgtaccaacaaaatactataagccatcctgatctacttctgtatttatatcttaagcatttcctaatcattctcccttgttgacaaattttcccataatcaagtgt

SEQ ID NO: 51142 - DNA, 348 bp, Glycine max
  Clone ID: LIB3167-006-P1-K1-E4
gactgaccaacttactcatgtttacacatttatcctccgtccggatgcaacctacagcatcctgattgataatgtggagaagcaaactggtagtctctactctgattgggatcttctccctccaaagacaatcaaagatcccgaggctaaaaaaccagaagattgggatgacaaagaatttattcctgatcccgaggataagaaaccagaggggtatgatgacatcccaaaagagctcccagatcctgaagccaagaagcctgaagattgggatgatgaggaagatggtgagtggtcacctcctaccattgccaaccctgattacatgggcccattgtaggcatagaa

SEQ ID NO: 51143 - DNA, 385 bp, Glycine max
  Clone ID: LIB3167-006-P1-K1-E5
agccttccggttcgttaaaaatggaaggcacaccacttaagccacgcacacgtagcttccttcatttcggaaattctaagcaatcattaaaagatggcagatggtgaggatatacaacctcttgtttgtgataatggaactggaatggtcaaggctggatttgctggagatgatgctccaagggctgtgttccctagcattgtgggtcgtccacgccacactggtgtgatggttggaatggggcaaaaggacgcatatgttggtgatgaggctcaatccaagaggggtattttaacactgaaatacccaattgagcatggcatagttaacaactgggatgacatggagaagatctggcatcacactttctataacgagctgcgtg

SEQ ID NO: 51144 - DNA, 384 bp, Glycine max
  Clone ID: LIB3167-006-P1-K1-E6
agccttccgccattatcaagacaccttcatctaattaaccatgaatcaccaacaacaatctcctgtgactgcatatccagcagtgagtcagagcaacccagcagctccaccaccacctgtgggttatcccacaaaggatgatgttccttcccaacaaaatgttccaatcaaaacctctactaggggtgatggcttttggaagggatgttgtgctggattgtgctgttgctgtgccctggattgttgtctctgattgaagttatggatttgggcttatcctctctgtcctttgtcattttctttactaatttaattttgtacttgtctaataagggtatttgtgtcctccgagacagcaaaattttatttatgtatgtgatggaa

SEQ ID NO: 51145 - DNA, 400 bp, Glycine max
  Clone ID: LIB3167-006-P1-K1-E7
aaaaaaaaaaaaaaaaaaaaaaatttttataaaaaaaaataaaaaaaaaaaaaaaaaaaatataaaaaaataaaaaaaaatataaaaaaaaaaattaataaaaaatataaataaattaaaaaaattttaattttaatattataattaaaatttctttcatgcaattttattatattattatacttttaatttttttgttggtttttgttttttaatattttttttattatttctgtttttttttactttatatatttttttatatttgtatcttataataatttatttttatttttttttttaaatttaatgtttccttataaaaaaattactttatttattaataattatattttctttttaaataaattttttttttttttcttttttctttattttt

SEQ ID NO: 51146 - DNA, 374 bp, Glycine max
  Clone ID: LIB3167-006-P1-K1-E8
ctcttgcggctagggttttagcgcttcttcttctagatttaaggaagatgggtaaggaaaaggttcacatcagtattgtggtcattggccatgtcgactctgggaaatccactaccactggtcacctgatttacaagcttggaggcattgacaagcgtgttattgagaggtttgagaaggaagctgctgagatgaacaagaggtctttcaagtatgcctgggtgctggacaaacttaaggctgagcgtgaaagaggaatcaccattgatattgctttgtggaagtttgaaacaacaaagtattattgcacagttattgatgcgcctggacatagggatttcattaagaatatgattactgggacatcccaagct

SEQ ID NO: 51147 - DNA, 459 bp, Glycine max
  unsure at all n locations
  Clone ID: LIB3167-006-P1-K1-E9
cgtccnngctcccaccatgtncnntccttccactttctctttcctcttttctccgnncaattcaattcttcgcagcgccttcnnttctcacgccgtgtgtgagggnnttttgattgggagaaatttgttcnngcgggggggttcaaaggtttnnttcgaanannttgggtccccgtgaaccgccgtnnttttttntnntggcggcannngtttgtggtggtnntatgtttcaaatggcaattnngagaagaacccagctttaaaggtnngtccaggctttgattccgagttgctcttcctcgaagcanagggaaattattgtccaagtgaccgaagagnngtgattcgtgcggcgtaacctctgcttgcggaatctcgacgaccgatgatgaagtttgatggatgctgattcntggggcccggggtctgatgatttntgattntgctggaatttggggg

SEQ ID NO: 51148 - DNA, 307 bp, Glycine max
  Clone ID: LIB3167-006-P1-K1-F1
cccacgcgtccgcaggatgaggctcttctagcatcttggaagcagcaactggatcgagatgttgagactctcaaaatcaaaggaaatttacatcacctgcgcacagttttgggacgttgtggaatggaatgtgaaggacttgagaccttgtgcattaaggatcagacacttacaaatgaaaatgcagagaagataattggttgggctttaagccaccaccttatgcagaattcagaagctaagcctgattcaaagcttgcattgtcctgtgagagcattcaatatggaattgggatcttgcagtcta

SEQ ID NO: 51149 - DNA, 370 bp, Glycine max
  Clone ID: LIB3167-006-P1-K1-F10
gtgacaccatgaatattaattcacttgcccgcaaatccttggtcaatgcagacggtattatagagaaaacatttttgtggggtaggtacgctttggaaatgtctgctgttgtttacaaggactgggttttcactgatcaagcactgcccaatgatcttgtcaagagaggagttgccgttaaggatccatctgctccccatggagttcggcttttgattgaggactatccttatgcttctgatgggctagagatatgggatgccatcaagtcctgggtgcaagaatatgtgtcattctactacaagtcagatgcagcaattcaacaagaccccgaactccaagcttggtggaaagaacttgtccaagtggg

SEQ ID NO: 51150 - DNA, 376 bp, Glycine max
  Clone ID: LIB3167-006-P1-K1-F11
cccacgcgtccgtgctgctgttgttaaacttagggttgagcctttttttgaggtgtttcagcgcttctttctcacaatggttcttcagaatgatattgatttgctgaatcctccagctgagttggagaagagaaaacacaaactcaagcgtcttgttcagtcaccaaactctttcttcatggatgttaagtgccagggatgcttcaacataacaactgtgtttagccactctcaaactgttgtggtgtgcggaaactgccagactgttttgtgccaaccaacagggggacgggcgaggttaaccgaaggttgctcatttaggaagaagggagattgaatggtttgttaaccagacttttctttgtcaatgatttgt

SEQ ID NO: 51151 - DNA, 374 bp, Glycine max
  Clone ID: LIB3167-006-P1-K1-F12
aacaagtagttgagaactaagaaggagaagcaaatggcttcctcaatgatctcttccccagctgttaccactgtcaaccgtgccggtgccggcatggttgctccattcactggcctcaagtccatggctggcttccccaccagaaagaccaacaatgacattacctccattgctagcaacggtggaagagtgcaatgcatgcaggtgtggccaccagttggcaagaagaagtttgagactctttcctacctgccagaccttgatgatgcacaattggcaaaggaagtagaataccttcttaggaagggatggattccttgcttggaattcgagttggagcacggtttcgtgtaccgtgagcacaacaggtcacc

SEQ ID NO: 51152 - DNA, 79 bp, Glycine max
  Clone ID: LIB3167-006-P1-K1-F2
tcgcccaagcgttcgggcaaaagaaaatggtaaccaccttaaatgcattaatagatgttttggatattatcctccaatc

SEQ ID NO: 51153 - DNA, 384 bp, Glycine max
  Clone ID: LIB3167-006-P1-K1-F3
cttccgctattttttgttttttcgcaatctcataacagaacacaacagagcccttcaactctctctgtcgttgatggcgtcacaagcgagcctccttcttcagaagcagctcaaagatctttgcaaaaaccccgtcgatggcttttctgccggtttggtcgacgaaaccaacatttttgaatggagtgtaactataattggacctcccgatactctttatgaggggggatttttcaatgccattatgagctttccacccaactacccaaatagtccgccatcagtgaaatttacctcagagttatggcatcccaatgtgtaccccgatgggcgagtttgcatatcaattcttcatccacccggtgatgacccaaatggttatga

SEQ ID NO: 51154 - DNA, 384 bp, Glycine max
  Clone ID: LIB3167-006-P1-K1-F4
agccttcggccaacccgtctgaaattgcccgacccaacttcacccagataatccaaatgctcctaaattatctttacactggcgcaccacctgaacccatgattccttcaagaatattcagttctgagaacactgtcttgccgccagagtcccccggtactagctccttaatggcgaaacgtgatgacacaggtgatacaccaagagcaaaggacgaaatcaagcctaatggttttctttgctgctttagtcagtgttattaactcccaaaatcaagggtgagttaaaaatggcataaaaagatgttagatagaatctagtccaaagtgatccttctgacaacttggtaaatgttcagactaatacctttgcaattccagtaaa

SEQ ID NO: 51155 - DNA, 197 bp, Glycine max
  Clone ID: LIB3167-006-P1-K1-F5
ttgttccagcacctgaccatgatgggaagggcaagtgtggcactaactgcacttgcacggactgcacctgtggccattaaggaatatgtatgaaaatgtaattgccatgtgtttggcaatacaaatatccaaataatgtcatcttcgtatgaataaatgtgtgtgctgttatcctacttcaagtctgtgtaatcatg

SEQ ID NO: 51156 - DNA, 381 bp, Glycine max
  Clone ID: LIB3167-006-P1-K1-F6
cttccgctttggtcacaccctcctcctctggtttttggggtttaagcgcaccttcttctagatttaaggaagatgggtaaggaaaaggttcacatcagtattgtggtcattggccatgtcgactctgggaaatccactaccactggtcacctgatttacaagcttggaggcattgacaagcgtgttattgagaggtttgagaaggaagctgctgagatgaacaagaggtctttcaagtatgcctgggtgctggacaaacttaaggctgagcgtgaaagaggaatcaccattgatattgctttgtggaagtttgaaacaacaaagtattattgcacagttattgatgcgcctggacatagggatttcattaagaatatgatt

SEQ ID NO: 51157 - DNA, 376 bp, Glycine max
  Clone ID: LIB3167-006-P1-K1-F7
ctcttcccaaactctcttcttctattccaaagacccttttgaagtaatcgatggagtttcagtctctttccagattctaccttcttctttccttaaccattctcttccttgcaccctttcacgctcaagctaaaattaaagtcacttactgcgataagaaggcagactatcctgtgaaggtgtctggagttgaaatatcaccagaccctgtggagagtggcaagcctgctacctttaagatctcggctacttctagtaaagctatttatggtggagaagttgtaattggagtttcatacgttggggtgcctgtccatactgaaagaattgatctctgtcatgaagtatcctgtcctgttgccaatggcaattttct

SEQ ID NO: 51158 - DNA, 376 bp, Glycine max
  Clone ID: LIB3167-006-P1-K1-F8
cgaagacccaccaacgcacgaaagccgggatctttcagaaaatggattcctattcgaagggtgcataaccgcatggataagctcacactaacccgtcaatttgggatccaattcggttccttaggaggtatcgggaaggaattttggaatgtaataatatcgattcatacagatacagaagaaagggttctctattgattcaaacgctctacctacgagatagggatagagaaagaggaaaaaaccgaggatttcacatagtacttttggtccgaaaaatcgatctgatttttttcgtacttttcgctcaatgatgaaatgggtcagattctacaggaccaaaccttgtgggagttaaggaatgatggaagaaaag

SEQ ID NO: 51159 - DNA, 374 bp, Glycine max
  Clone ID: LIB3167-006-P1-K1-F9
tttcttcattgttttgctctaaaaatggagagagattttctgggtctgagctcaaaagaaccattggctatgatgaaggaagagatgaatattgatattggaagcaaagacacaggtttcacaaatggagcagtggtaaaatggcccttcatgaacaaagtatatgtccatcctcttttgatgtcattcaatcctcctcaggtgaattctgtgaaccatcctcatggtatgaagatgttttcagttcccaatcaagcaatttcagtttccatgggacatccatccctaaagaatcattttgcaactgttggtcagaatatgaatgttgctactgtgaagcaaccactactcggaggaatacctgttacggtgcc

SEQ ID NO: 51160 - DNA, 377 bp, Glycine max
  Clone ID: LIB3167-006-P1-K1-G1
atcaccacaggaaagagggatggcgaagtccttgatcaatatcgcatttgttagtcattttatgcatcgaaatacatcgccaatagaactttattttgaaaaataagttggcgataaaataaatgttgcatccattctaaataatttaaatagtttggtgtccttgttcgttcatgaatcctaattcgtcgtgttttaatttggatcatgttattgtattttgttctagttgagttgtgttactattgatatgcttgctgtagaccaaggaaagtctatatatgcagcaggttatgtgatgaatttgagtgtgatcattaaagttgccatggttgatatcttcaaacaaaatatttaataagagtccttagatttat

SEQ ID NO: 51161 - DNA, 208 bp, Glycine max
  Clone ID: LIB3167-006-P1-K1-G12
ctcatccctgtgaatgccgctccacttccaaggcaaactctgaaacctctctggttctctgtgacagcggaacaaattatatgatcatgtattcgttgacactgaaacccttcttcactcctcaattagtttcttcgtcttcttcaacttccacttcgtcctcttcgatttctctcgtgtccttcccaaatcacttaggagcatcaaa

SEQ ID NO: 51162 - DNA, 339 bp, Glycine max
  Clone ID: LIB3167-006-P1-K1-G3
ccgactcgtacggcgatatgaaggcatgctatcctgagaaggggtctggagttgagatatcaccaaaaccctgtggagagtggcacgcctgctacctttaagatctccgctacttacagacaagctatatatggtggagagagtgtaaatggagtaccatacgttggggcgccagaccatactgaaggaatagatctctgacatgaagtatcctgagctgttgccaatggcaagctgctgatttctcacacacaaacattgccttcgattactacaccagggccctactctctggagatgacactgtaacatgatcgggactgggtcgtaacttgcatt

SEQ ID NO: 51163 - DNA, 308 bp, Glycine max
  Clone ID: LIB3167-006-P1-K1-G4
gcaaggtgtaaatgatgggatggaagaatgtctctatgtttggtctacgattatggcttgatgcacataggatatgccaattttcattcctaacattccattcctgttttgactcatatcagcaataggtaacaagagcccaatgcaagaatgggtgtgagtgagtgcaactgcaaactaatgaaggcatcttcttataggtataatgcaggaggtgcatctcacgagcacctttgtaatttattttaaaattatatgtctaaactatttataagtagaaaagattgaactgcaactatggtgctctt

SEQ ID NO: 51164 - DNA, 367 bp, Glycine max
  Clone ID: LIB3167-006-P1-K1-G5
gcgtccgccacgcgtccgcccacgcgtcgggaagaatagaatgggatctggaagtggaaaacacactggagagttcttcaggagaagggatgcatggaggaagcatccgatgctcaccaatcagctccgcacgccacccctggccttggcatcgccgcgtcgccttcggtatctacctgtcggcacaagtctacaataggctctatgctcccgtcctcattcgatttctcacgtgaaagccggggatcaccactaaacgttggcggacgcactcattcacatcacttaataagcttgctagcatgttctcgcagcctttaagttaaatttcagaccgtgttcgcttcttggcactcactatgttgtc

SEQ ID NO: 51165 - DNA, 386 bp, Glycine max
  Clone ID: LIB3167-006-P1-K1-G6
agccttccggtttttttcctaacaggatcatttcgttcggagctgaggaggcagaaacacaacaacatatgagatggaagctgcaaagggaaccgtcaaaggtgtggctatcatcatcggagacaacaacattagaggctctcttcagtttcttcagcaccccaatgggaccacccatgtgacagggagagtgacagggttgtcccaaggctttcatgggttccatattcatgcttttggtgacaccaccaatggctgcaactccactggtcctcacttcaatccgttcaagaaggatcatggggctccttcagatgataagcgccatgctggtgatttgggcaacattgctgcaagccctgatggagttgctgagatttctatta

SEQ ID NO: 51166 - DNA, 376 bp, Glycine max
  Clone ID: LIB3167-006-P1-K1-G7
cataacttgcatagactattgattaataaagctattgtcattgatttgctagctgcaacaatgggttctagcagattatcattcattttagtacttgtgcttgtaaccttttcatccatgatcattgactcaagggttgcagaggcacgtaccctgccaaaatcagccttattgccttccaaagctgatatacctactgttgttcctcttccactggtggcaccactgccaaatttgcctgttactctcccttcagtgcctgaactacctgcagtacctaaagtaccaattgctgaagtaatagataataacgccaaaataatccctttggttcctatgatctatccagtcactactacttattttgtcacttgct

SEQ ID NO: 51167 - DNA, 61 bp, Glycine max
  Clone ID: LIB3167-006-P1-K1-G9
cccacgcgtccgcagacagagacagtttgtgagagagagagatggggagcgacggggaggc

SEQ ID NO: 51168 - DNA, 381 bp, Glycine max
  Clone ID: LIB3167-006-P1-K1-H1
cccacgcgtccgctaacccaattgaaagcatccttctaccacctctctctctcacatcataatacctcaaaggacaatcattatttcacaaaggtcttccaaagaagactttcttcacagagccaaaaaatttggagtgagaagtgaaggggaaaaaaagaaaaaaaaatattcattttttttttatcattaagcaatggtagtagacaagcacactagtactcactgttgttcattgtgaaatcatcatcatcatgggttgctcagcctcaagaaccatcaccatagtggccaacaacaataaccaattagaggatccatcttctgcttctcttgcttcttctttctcttcctcttctgcctcacacaaatccattaact

SEQ ID NO: 51169 - DNA, 370 bp, Glycine max
  Clone ID: LIB3167-006-P1-K1-H10
tttgtcttctcattctcatcactaacacacaagtgtgtgttgtagatttctcagcttgcaacatggcttccatcatcatgtcatttgctccagcaactggtagagtctttgcagccacagcggcaaagggtgctggtggaagcaaagaagagaagggtcttcttgattggatccttggagggttgcagaaggaagaccagctgctagagactgatccaatcctcaagaaggtggaggagaagaatggaggcaccaccagcaacactggccgcaacaagaactctgtggcagtgccacaaaagaagaaaggtggctttggaggcctctttgcgaagaactgaaggagcagtgatttattaccttatatttg

SEQ ID NO: 51170 - DNA, 103 bp, Glycine max
  Clone ID: LIB3167-006-P1-K1-H12
cccacgcgtccggttctagatcgcgagcggcccccttttttttttttttttcacatgacaaatacatttttttttaacaagattaatactctaatatcccacc

SEQ ID NO: 51171 - DNA, 262 bp, Glycine max
  Clone ID: LIB3167-006-P1-K1-H3
ggggataaaaacttgcactaatttaatgctgaagttaaaattgttctgggcaagtgatattgattatagtcatccaattcttcgcattgcttatgttccagcgcacctccttttacagacctgatatatcattagatagattttatcatttttaccttcttttttgtacttaatactttcttgtgcctttataatttaaattgatatgtgatgagcaatggagaaagggaggctgtttggtttcctcgcattaatgtttttc

SEQ ID NO: 51172 - DNA, 346 bp, Glycine max
  Clone ID: LIB3167-006-P1-K1-H4
cccacgcgtccggccagacgcagtgactaaaccaaacctctcactcgccgtcgtagggtttctcctttcgtttagcaacaacaacaatggttgcagccaagaaaaccaagaagacccatgagagcatcaacaacaggctcgctcttgtcatgaagagtggaaaattcaccctcggttacaagacggttctcaaatcacttaggagctccaaagggaaattgattatcattgctaacaactgcccccctttgaggaaatcagagattgaatactatgctatgttggccaaagttggagttcatcattacaatgggaacaatgtggatttgggcactgcatgtgggaa

SEQ ID NO: 51173 - DNA, 373 bp, Glycine max
  Clone ID: LIB3167-006-P1-K1-H5
gcgttttgttcctatgatggccgtgtcattgtttggaaggagggcaaccaaaatgaatggactcaagctcatgtgtttgacgaccacaagtcatctgtgaattcggttgcttgggcgcctcatgagttgggtctctgcttggcttgtggctcgtctgatgggaatatatctgttttgactgcaagagcagatggtggctgggacactgcgagaattgatcaggctcatccagttggtgtcacttcggtgtcatgggcaccatcgatggcacccggagcccttgtcggtgcagggctgcttgatcctgtacagaagctgtgctctggtggttgtgataatactgtgaaggtatggaagctaaacaatggactct

SEQ ID NO: 51174 - DNA, 406 bp, Glycine max
  Clone ID: LIB3167-006-P1-K1-H6
ggaaggaacgggccggaccaacccgtcgttttcttttgatttgggctttcggtttcacgtaacataacgcaacgtttgcagaaaagccaagcttgtcttcagtttctctttgtcgctagtaacagaatattacaaagtaacggctttctgagtggagcgcttgatttcgtttggtgggtcaacttcaagtttcgattttgttcatttttctctcgtcgattgagaaggctcagttgcagagacagtgggggtgggacggttatggctttttgcccaattttttgttgcggaaatggttcggatcgcaaaggacgagggaagaaacaacctccatggcgggtgttttctttgaaggaattacactccgctactaataatttcaactatgataacaaacttggcgaag

SEQ ID NO: 51175 - DNA, 381 bp, Glycine max
  Clone ID: LIB3167-006-P1-K1-H7
aagccaagtgaaagtgagaaaaaataaaaatcaaagagcataatgtcagggatcattcacaagattggggagacccttcatgtgggagggcacaagaaggaggaggagcataagggtgagcaccatgctggagaatacaaaggggagcaccatggtgaacacagtagtgagtacaaaggagagcatcatggtgaacacaaagctggagagtaccatggtgagcacaagccagagcacaaagaggggttcctagacaaagtcaaggacaagatccatggtgagggcggcgccgccgagggcgagaagaagaagaaggagaagaagaagaaggagcatggccatgagcatggccatgacagcagcagcagcagtgacagtgat

SEQ ID NO: 51176 - DNA, 374 bp, Glycine max
  Clone ID: LIB3167-006-P1-K1-H8
ggaagaaccaccactaccttatccatttccactcctcaccaagccacaccatggcctcaaccaacgccctctcttcagcttccattctacgctctcccaaccgccagtctctgaccagaagagcgaaccacaacggaagagtaaattaccgtcaaccgaatagccgtttctccgtcaaagcctccgccaaagagattgcctttgaccagcattcccgctctgctatgcaggccggcattgacaagctcgccgacgccgtcgggctcactcttgggcccagggggaggaatgttgtgttggatgagtttggaagtcctaaagtggttaacgatggtgtcaccattgctcgcgccatcgagctttcagatcctatg

SEQ ID NO: 51177 - DNA, 181 bp, Glycine max
  Clone ID: LIB3167-006-P1-K1-H9
gcaaaagatttatccagatgagtggaacaattttcttgaacgagtgaaatctactgaggaggatattaaagggagtgaatttgatgagttagtagaagaacgtcgtctttgggcatcatatagagggcaaacattgaccagaactggttatttctctttcactccaccccccccccccccc

SEQ ID NO: 51178 - DNA, 261 bp, Glycine max
  Clone ID: LIB3167-007-P1-K1-A1
agaaggacttgctcaaggttgttgatagggagtacacatttgcatacattgatgacccctgcagtggcacataccctttgatgcaaaagctgaggcaagtgcttgtggactattcattgtccaatggggagaacgagatgaacacgaactcatcaatcttccataagatcgcaacatttgatgtgtgttgtcgtttaccttttttttcaattgatattttgtcagttactaattatgtttaattaatattgttattttctt

SEQ ID NO: 51179 - DNA, 359 bp, Glycine max
  Clone ID: LIB3167-007-P1-K1-A10
gcgacaagttccattatgagtttgctagattcctgacagggttttaaggaggtgggtacttgacaggtcgcaaaaaaggggtggcctttactctcattggagaatgtctgaatctgcttgacactgtcgtatgaagtagaaccatgaaaaaattatcttttataagaggcagtaatgtgcctttgggaatgtgagcatgatttgcaaatggggatgctctgaatagtttcacaagagctctcagcctatcaggaaggaaaaaaatggccttgatttttttttttggagaaagtgagagagaacaaaggtcaaggaaaatcctttgcaccatctttttatatacgggaaatagaattttt

SEQ ID NO: 51180 - DNA, 372 bp, Glycine max
  Clone ID: LIB3167-007-P1-K1-A11
cccacgcgtccgcacacacatgggttcttcaagtcatcatatctgaatgagagaaagctaacgtaacgtggtgattccaaaaagatagcgtcacgctaaacattgctgcaggtgttagaggcatcgccgtcctatctggacctcaacatgcctatagaagacgtcgaagacggcaccacttacaaggactatgaaagcgacgcctggttaaatgatttgtgtgatcaagttgaagaagaagacccttctaagccattaaactaggactctattggtgaaatatgaatatactgtattgacacgcaatttgaagagatgtaaggatcagagattatacttgaaatagagtatgatgtcatcacacagagactt

SEQ ID NO: 51181 - DNA, 380 bp, Glycine max
  Clone ID: LIB3167-007-P1-K1-A12
ctcacaaaaagctttcatccgtttctgcatgggaaaacagcaagaaagctgctgtggaggctgacctgaaaaagattgaagaagaactggagaagaaaaaggcagaagctgcagaaaagataaaaaaacaaaattgctgcaatccacaaggaagctgaagaaagaagagcaataattgaggcaaagaaaggggaagatcttcttaaggcagaggaacaagctgcaaagtatagagcaactggaacagctccaaagaaactccttggttgtttctaatgcttcaaatctcaagcattgtggggaaagaaaaagttattttttattgtgtatctttggtcattaaatatcattaatacaagtgtggttttagtttacatgtt

SEQ ID NO: 51182 - DNA, 377 bp, Glycine max
  Clone ID: LIB3167-007-P1-K1-A4
cccacgcgtccggggtggtgcctctcttccatctccccagccaaaacctctctcaggaaggccacattacgcccttccgtcttcgcaacccttaacactccttcttctccttcctcttcatcttccttcccctctctcattcaagacaggcctgtttttgctgcccctgcccccatcatcaccccaactgtgagagaggatatggcaaaggaatacgagaaagctattgaagaacttcagaaattgttgagggagaagagtgaactcaaagcgactgctgctgaaaaagtggagcagataacagcttctctagggacattatcatctgatggcatcccatcatcagaagcctcagacaggatcaaagctggtttcat

SEQ ID NO: 51183 - DNA, 363 bp, Glycine max
  Clone ID: LIB3167-007-P1-K1-A5
accacgcgttccgcgcgaaactgtctttactactgactcacacaaccttgctctgtgcgagcctactgattcagccaataccgaagggcgtcaagtggagaagcactacctttcttcatcgggacctatacgcctgcatgctgatcctgactgcaatagcagaaactaatgaattgcaaaccacagggggacccatctgcaaagagatgatgaccctactcactgagaacaagaaaaggcagagctctataatgcagatagcactaccagagatagatacccggcacagcatagctactatcatatagctgacaggagggcgaaggattatgcacacagtctgctacacaagtggaccaaaaa

SEQ ID NO: 51184 - DNA, 159 bp, Glycine max
  Clone ID: LIB3167-007-P1-K1-A6
cccacgcgtccggttctagatcgcgacggccgccctttttttttttttttttttttttgaaagcatcaccatgattttgacagttttattctgtataacgtgtgtgcacaaatcaaagaaattacatgagtacaaaattgctgacaattagaaacaaaa

SEQ ID NO: 51185 - DNA, 371 bp, Glycine max
  Clone ID: LIB3167-007-P1-K1-A7
ctcctccaaattgcgtcttcctccaatttccagtttctactttctagcttctttccttttctttaatattggcacaaactttgccttctctctaattattcccaaattcataatcgtcctttgccctaaatcgagtataacaatcatcctttgccctaattccatctcacttccattattaatagcataaactcctccccaatttgtgaatttcccttctgtcatatgtttgctttcatctctctcacctatctagtctcactgtgcttatggtttctgtattttgctggaatcaccgtgtctccacctacacgctctgccaaagggtttctcttcacaacaaccagtttggagtctcttcactatgcttt

SEQ ID NO: 51186 - DNA, 377 bp, Glycine max
  Clone ID: LIB3167-007-P1-K1-A8
cacaaagagaagcattagcactaggagcagcaacaactagtctcagctgaaatggcctcttcagtgatggcatctgtggccctcaaacctgcccctttcactgttgagaagtcctcagtgagaggccttccctctctctcaaggaactcttcttcattcagagttgtggccagtggcaagaagatcaagactgacaaaccttatggaattaatggtggcatggctttgagggatggaactgatgcatctggcaggaaaggaaagggaaagggtgtttaccagtttgtagacaaatacggtgctaatgtcgatggttacagtcctatctacgacaccaaggactggtctccaaccggtgatgtctacgctggcggtac

SEQ ID NO: 51187 - DNA, 196 bp, Glycine max
  Clone ID: LIB3167-007-P1-K1-A9
gctaatacgtgcaacaaaccttgtcttctggaagggatgcatttattagataaagggtcaacacaggctctgcctgttgctttgatgattcatgataactcgtcggatcgtacggcctttgtgccggcgacgcatcattcaaatttctgcccttgttccatagaaaaaaacaaaaaaaaaaaaaaatattaatgac

SEQ ID NO: 51188 - DNA, 381 bp, Glycine max
  Clone ID: LIB3167-007-P1-K1-B1
gccactctaaagaaaatggcggtgcctctactctcgaagaagatcgtgaagaagagggtgaagaagttcaagaggcctcagagtgacaggaaaatttctgtcaagacaaactggcgcagaccaaagggtatcgattcccgtgttaggagaaagttcaagggatgcactttgatgccaaacattggttatggttcagacaagaagacccgccactatctccctaatggttttaagaaatttgttgttcacaatgtgaaggacttggaactgctcatgatgcacaacaggacttactgtgctgagattgcccacaatatatccacaagaaagaggaaagatattgttgagagagccgcgcagcttgatgttgttgtgacaaac

SEQ ID NO: 51189 - DNA, 378 bp, Glycine max
  Clone ID: LIB3167-007-P1-K1-B10
cccacgcgtccgcccacgcgtccgaaaggctgcaccctcttttatccctcaaaaaccaaaaccctaatggcagagcgcggaggtggcgaccgtggcagcgaccgtggcggtttcggacgcggctttggtgggcgagggcgcggaggtgacaggggccgaggccggcgccgaggtccccgccgcgaggaagaggagaaatgggtcccagtgaccaaactgggccgcctggtgaaggagggaagaatccgaagccttgaacagatctacctccactcgctcccgatcaaggagcaccagatcatcgacacgctcgtgggtcccaccctcaaggacgaggtgatgaagatcacgccggtccagaagcagacccgggccggg

SEQ ID NO: 51190 - DNA, 375 bp, Glycine max
  Clone ID: LIB3167-007-P1-K1-B11
ttgctttaccaaattccaatttccaattcaaaaccctaactccgttcgaagcaccaaatcgtgatggcaccaaaggcagagaagaagccagcagagaagaagcccgcggaggagaagaaatcgacggtgggagacaaggctccggcggagaagaagccaaaggccggaaagaagcttccgaaggagggaggcgccggcggagaagggaagaagaagaagagaaacaagaagagcgtggagacatacaagatctacatcttcaaggttctgaagcaggttcaccctgacattggtatctcaagcaaggccatgggaatcatgaacagcttcatcaacgacatcttcgagaagcttgcccaggaatcttctagactt

SEQ ID NO: 51191 - DNA, 258 bp, Glycine max
  Clone ID: LIB3167-007-P1-K1-B12
cccacgcgtccggctagttctagatcgcgagcggccccctttttttttttgttggtatttttcaacgggcgaaaggcacataacattccagcaaagaataaccccgcattccaaagtaaatcgaccgaggatagacaaggctccaactgagaataagccaaaggccagaaagaaactaccaaaggagggaggcgccaactgataatggaagaagaagaatagaaacatgaataacgtggcgacatacaagatctacat

SEQ ID NO: 51192 - DNA, 379 bp, Glycine max
  Clone ID: LIB3167-007-P1-K1-B3
aaattgtccgtgaagtaatcgattttatcaaagggcatcaatcactgtttgatcaagttctccgtttagacattgccgaggcagatgaactaagaacagagcaggtcaatttagttgttggtattcttagcaaggtttggccatatgaagagagcaatgagtacggttttgttcaagggctttttggtctgatgcatgctcttttctcacgtgattcaaagattcctagttttgctcaatcaagagtatcacctgagaatcagaggaattcagaactacagatgtttaatttgtgctacagcctgagctcttacttgtattttctagtcacaaagaaatccctgagattacagccttcagatgcctgttccagttacgc

SEQ ID NO: 51193 - DNA, 376 bp, Glycine max
  Clone ID: LIB3167-007-P1-K1-B4
accacgcgtccggcaatggagacagtagccaaaagggctagaagcttccctagaacatttgattgaccttcaccaccacaaatctcttgtccttgcccaccacacagacaaagccaagaaggacgcaataaggaaagccgagcacgtttctgatttgttggttgaagcggtgaatggtggggtccaagattccttcatcaaccagaagcgaattgagctcgaaattcgaactctggctaccaccatcacgaggttcatgaagcaaactgatcaatggctcgctgccactcatgccctcaacactgctctcaaggaaattggagactttgagaactggatgaatatcatggaatatgattgtaaaagtatcaccaca

SEQ ID NO: 51194 - DNA, 53 bp, Glycine max
  Clone ID: LIB3167-007-P1-K1-B5
aatttttaaaaatgtgaatgatgaatgagacaatacctgttgttacttctttg

SEQ ID NO: 51195 - DNA, 380 bp, Glycine max
  Clone ID: LIB3167-007-P1-K1-B6
cccacgcgtccgagtgaaggcagagggtgtggccaagaacgctccccctgagttccaaaacacaaagctcatgacacgtttgacctacactcttgatgagattgagggaccctttgaggtgtcttctgatggcactgtgaagtttgaggagaaagatggaattgactatgcggccgtcacagtccagctaccgggaggcgaacgtgttccgttcctcttcaccatcaagcagttggtggcatcagggaagccagacagctttagtggagagtttctggtcccatcataccgtggaagctctttcttggaccccaagggaagaggtgcctctacaggttatgacaatgcagttgctttgcctgctggtggaagaggagatg

SEQ ID NO: 51196 - DNA, 369 bp, Glycine max
  Clone ID: LIB3167-007-P1-K1-B7
cctagttgttgtttttctcaatgagaagggtttccactatgcattgcgcactttggcgcttctgtgttcccttgttgctacttgctagcttcagttatgctccttttgttttggccactgaaatttcaggcaatgaagtgagcactgatggaaaggttttaaatgaagagttagcaaaacctaatctacaaggacatgatgaagaagcaaagtttaaaggatttattccaaagccaattcccatagtgaagcctattccaaaaccatttcccatcattaagcctattccaaagataattcctatcgccaaacctattcctattccgatttataagcctatatcaaaatcaattcccattattaagcctg

SEQ ID NO: 51197 - DNA, 379 bp, Glycine max
  Clone ID: LIB3167-007-P1-K1-B8
cccacgcgtccgatggcttcttctacatcacatccatccttttggtccctcctgaacctgtctgcatccattcccatttcttcttccgtatgcatgttcccaccgtctaaaaaacctagcaaagcaacaaaacggcgtcatgcttgggaagtagcatgcaatggtaaccctagaaataggagggacattctgatcggccttggaggactctatggtgctacaacaagtctcacaagtaacaacactggttctgcatttggtgcttcattgtcgcctccagatccaactaactgcgttcaaccggacccagaaaaagaccctttttgcccaccaccccccttcaaagactacgagctccctccacacgatgacaagacat

SEQ ID NO: 51198 - DNA, 378 bp, Glycine max
  Clone ID: LIB3167-007-P1-K1-B9
ggtttttgattttcaaccaaaagatcctgaagatatatatgtggcactagcggctctatatggtagagcagtgccaggaactgttctggtgaggcagttaaaaaagttgccgagaaacaaatgctggcttgttggatattcaaaggcagaggcggatgctatggaaatagcaagggaattcaacaaagaatgggaaacaaatttgaggattggccttcatgattgtcgcgattataccaatagtttggttaggcaactcactggcgaaaaagatgtgctgaaacgtttgagaaacgttggtagttagagggaatccgttgtctggttagaagatcactttattgaattactttatcttgtatcatgccttcaacattt

SEQ ID NO: 51199 - DNA, 337 bp, Glycine max
  Clone ID: LIB3167-007-P1-K1-C1
aatcgaaccacatgaccttctttggatctagcaaaggtactcctacaaatgttcacagccagaaaaatggcgaaagccatttttgctaatagtggataacaagccaacgacactcaggtgaaactagtatggtgttataacaaagcaccaggaagaccatataatgaagaaacccatagctcgtgctaaatcgtatcatggatcaacattgatagcaagcagtctatctggccttccggctctgcatcaaatatatgatatgccagctcctttcgtattacacactgactggccacattaccggctgcatcatcttccaggtgagacagatgaagaa

SEQ ID NO: 51200 - DNA, 178 bp, Glycine max
  Clone ID: LIB3167-007-P1-K1-C10
atgaaattcatgtcaagggttgttttgtgcgtgaatcatattgtcattgtcagtttagttgcatttttagaatacttgcagaactgcagttgtgagaggaactgattccctgtctctgtaaattagatttttttcaatgatcagcagtgtgtgatattgttatttcccggagtctgtc

SEQ ID NO: 51201 - DNA, 366 bp, Glycine max
  Clone ID: LIB3167-007-P1-K1-C11
cctaacaggatcatttcgttcggagctgaggaggcagaaacacaacaacatatgagatggaagctgcaaagggaaccgtcaaaggtgtggctatcatcatcggagacaacaacattagaggctctcttcagtttcttcagcaccccaatgggaccacccatgtgacagggagagtgacagggttgtcccaaggctttcatgggttccatattcatgcttttggtgacaccaccaatggctgcaactccactggtcctcacttcaatccgttcaagaaggatcatggggctccttcagatgataagcgccatgctggtgatttgggcaacattgctgcaggccctgatggagttgctgagatttcta

SEQ ID NO: 51202 - DNA, 368 bp, Glycine max
  Clone ID: LIB3167-007-P1-K1-C12
gtttgttgatcgagataactagaaacagtgtgatgaaaatgaaggtccttgttttcttcgttgctacaattttggtagcatggcaatgccatgcgtacgatatgttccctctccgaatgaacactggctatggtgcccgtactccggaggtgaaatgcgcaagttggaggcttgctgtggaagcacacaacatctttggctttgagaccattcctgaagagtgcgttgaagcaacaaaggaatacatccatggcgaacaatatagatcagactccaaaacagttaaccaacaagcttacttttatgccagagacctcgaagtccatcccaaggacacatttgtgttcagtatagatggcaccgtactc

SEQ ID NO: 51203 - DNA, 269 bp, Glycine max
  Clone ID: LIB3167-007-P1-K1-C2
ggaagggagcttgcaatgatgcggtacagttaaaagaccggcctgttatttagatgaccgacatacctagcatagatgtgtatatttataatagagaaccaacctaggaatggaatggaaattcttgcttcctatgttttaggcggactatagttcagtagacggtcggtcatattgattttttagtatttatttaaatttgaatgtgatttgatccgtataaaaaaaaaattatatataatgaattatatttaaaaaaattaatttat

SEQ ID NO: 51204 - DNA, 380 bp, Glycine max
  Clone ID: LIB3167-007-P1-K1-C3
gtttttagctgcagttgcaatgcaagagttcattgagtattttgattgccatatttgcttggcctaacttctaaaaggagctgctgaataaataactcaaagggcattcattccacagaggaaggttcgcacctgctttacatttgcagccgatcctgattatctaaacaccaacattcgcgtgaagtcggatcttgatgctcttggttctctgggtgatgcaggatggtattgtattagggcaatcctgttggctgccaactacgaattgcctaaaacagtagttgcttcatatgaacctgtacttaacaaagatggggtgatattggactgtggggcatctctatactgggaagatgggaaagtagcaaccttccatt

SEQ ID NO: 51205 - DNA, 375 bp, Glycine max
  Clone ID: LIB3167-007-P1-K1-C4
aaatgaagagaagaaaaacccggttgaacctgaacccattgcaaacgaagaaaacaggggaaacagagaagagaaacaggggaatcccattgaaccggtggaaaccgattctcaggatcatgtttacaggtggatcacgagccaatctcaaacaacgataaaatctcaaatgggttttcaatcaagttcgcgttttgacgagtctttcgtggagtggaacgtgaaagcgccgttggaggtcatatacgaaggtgaagaaacagagcagaatcaaaatgagaaacgtgacgagggtattttgaggcacccgtcgttgtcacggtactaccctgaaactgactccgatagctcgtcggagagtgggtttccggcgac

SEQ ID NO: 51206 - DNA, 380 bp, Glycine max
  Clone ID: LIB3167-007-P1-K1-C5
atttttccattccttataaaacccgtaaacaaaaaccacgcaatggtcacgtccaacaccaacaacaccatcctcaaaatctccaaactcgcgatcctcctcgttttgttcgcttcagtctgcaacgtcgctatgtcggactccaccgccaaacccctcgaccagcacgccaccacgggctctgaccctactgcgccagcggttcacatcgtgtacaccgagagaccacagaacgaggagcctgaggcctaccacatcagaaccctcacttcagtccttggcagtgaggaggctgcaaaggaagctttgttgtatagttacaagtctgcagccagtgggttctcagctaagcttactccggagcaggttgaacagatttc

SEQ ID NO: 51207 - DNA, 377 bp, Glycine max
  Clone ID: LIB3167-007-P1-K1-C6
caataacttgtaactcgcgtagtgcacgggacagcttaaacgacgccgcgctgatcaacgactccttacgtaaacgacgacggtgtcagacaaacggtgccggttggtggtgccgccacgctattacgctaatcgtatccatcaccctcatcaaaacccctcctttctcttaatttagaaaccctaattcagaagaaaaaagtcaccttctccagaatttgcgcggtaatggcatcttcttcagactcatggatgaaggaatataatgaagctgtgaaacttgctgatgatatcactggcatgatttctgaacgtagttcattccctgcatctggaccagaaacccagcgacatgcatctgctataagaaggaagat

SEQ ID NO: 51208 - DNA, 380 bp, Glycine max
  Clone ID: LIB3167-007-P1-K1-C7
cccacgcgtccgcccacgcgtccggtattaagatcgttcggtgaaattgatcacgctggtgccgcataccctagcgttcctgttattctattgtggctgaaacaaaacagtgttgaacggcgaggtagaacgacgacccccttctgcgttttgaccttcaatctcaatcatggccaaagctgaaggtggcaaggaaccaataaatgaacaagcagtagcaaatatgtatgctgcaatgaggtctgagctcaaccaaatttactccaaaataactgaactggagatggaagttagtgagcacacattggttaccaatgccattcaaccacttgaccaatctagacgatgctatcgtatgattggaggggtgcttgtggaga

SEQ ID NO: 51209 - DNA, 189 bp, Glycine max
  unsure at all n locations
  Clone ID: LIB3167-007-P1-K1-C8
ggggcgaccacgcgtccggccacgcgaccgcccacccttccgttcttataccgaccagagaaanngaggcgcgcgtctntccctcgccgggggggtcctcttattcccttttgcctttaacaaaacacctctctcctcctagatttaactactacccccttcttttttttccacctttaatctcaatca

SEQ ID NO: 51210 - DNA, 378 bp, Glycine max
  Clone ID: LIB3167-007-P1-K1-C9
attaaagcatgggaagcgtggtagaaagcagagaatggtacttagctgcatattcccctcacggtgtaccaaattccgataatctgaaactccgcaccgtcgctctctcattatcctctgattcaatccccgacggccacgtgtccctccagatcctctttctctccgtagacccctaccttcgcaccagactcaccggcaccctcgacggtctttacattcagcaatatccactcaacgaggtgattacagcatatggagttggcagggtaataggatctaaagacagcaagtacacggagggtgatcttatattaactccttctgcgccagtggctgagtactgtatcttaccctcctctcgtgtaattcgaaaaa

SEQ ID NO: 51211 - DNA, 314 bp, Glycine max
  Clone ID: LIB3167-007-P1-K1-D12
cccacacatacggtcagagagtttgaaaaacggagcgcactggatgatgtgggaacatgacctataaaatggaaagacgtacatgaaattaacactatatacgtcgtgtaccttgcatcctatgcatcggataattgggagctgaacgaatggcgatgtaccataaagggcaacatgtacaaccaccaaagtgagacctaattattgactacagaattatttacatgaccttaaaagacccactccgattcaaatactcaggccaccatcaagggccaaaataccaggtccacagacaaaataaatggcggcca

SEQ ID NO: 51212 - DNA, 375 bp, Glycine max
  Clone ID: LIB3167-007-P1-K1-D4
gaaagtagagacacacaatccaaaatagtcttattgaagggtgagggtcacctgggaaattcatccatgccatggctcccactcttacatccaattcatcttttttaagcaccagtcctcattcaagggtgagcctccggaatccaaggctgagagtctttgccaagaagtctggatcattcccatcatttggactaggcaagcccaaagatgattcttcttctgctgaagaaaaagataactcatccaattccaacccctttcgtttggactttggaaagatacccgatgtaacgtctttgatcccagttccaagcaacacttctgcgccaggctgttcttttggatacacaaggcgcaaggacccttcaacag

SEQ ID NO: 51213 - DNA, 340 bp, Glycine max
  Clone ID: LIB3167-007-P1-K1-D5
agagaacaaagcacttagtgctattttataattacgaaaaaccaacagcgagtgttgtttttgtttgggccaggctggaccagggaatgaatagagatgagaggctttcggttgatgtgaactgagttaagcggcgaagccaaacgcagaatcggcggcagaaattgccaccggaagcacgtcgaagacgggtgaaccaaacacaaaattgcatccaccactcatatgttcaatccccaactcaaatctgtgaagaaaatctcaatttataaatcgcaattgttagcactactgctagtagccgtaaaaaaaaacaattagacagatgtagagtgttttt

SEQ ID NO: 51214 - DNA, 311 bp, Glycine max
  Clone ID: LIB3167-007-P1-K1-D6
taaaaacaaaagaaaaaaaaaaaattttattaaaacaacaaaaaaaaaaaaaaaaggagggaaaaaaaagaaaagaagaggaaaaagaaaaaaaaaaaaaaaaaaaaaaaaaaaattgtaatagagaaaaaaaaaaaaaaggggggggccctcttagaggacccaggtttacttcccgggccttgccaagtataatttttttttttgggcccccaaaatcaaattagtgggccccggtttaaaaacgggtggccgggaaaaccccgggctttccccatattattggcctgggagcaaatccccttttcccc

SEQ ID NO: 51215 - DNA, 377 bp, Glycine max
  Clone ID: LIB3167-007-P1-K1-D7
agaatggctcccaagggtttaacctttctggctgtgttaatatgcgtttcagcactgtcactgagtccttctgttgcgggggaagggcaaaataatggccttgttatgaacttctacaaggaatcatgccctcaggctgaagacatcatcacagaacaagtcaagcttctctacaagcgccacaagaacactgctttctcctggctcaggaacatcttccatgactgtgctgttcagagttgtgatgcttcactgttgctggactccacaagaaggagcttgtctgagaaggaaacagatagaagctttgggttgagaaatttcaggtacattgagaccatcaaagaagctttggaaagagaatgccctggagttgt

SEQ ID NO: 51216 - DNA, 370 bp, Glycine max
  Clone ID: LIB3167-007-P1-K1-D8
ctctgattcattagtgaagaaaaatggcaaccatcatcgccggcatcccaactacatcgatcactcgcgcaggtcttgtgctcaaacgacctgttggagcctcgtcctctaccgttcttggattgccagcaatggctaaggcagggaaagtgaggtgctccatggaggaaaagccttcaagcagctcaaatatagggatgggggcatccttgttagcagctgcagttgccgcaaccatgtcaagcccagccatggctttggtggatgagagactcagcactgaaggaaccgggcttccctttgggcttagcaacaacctccttggttggatcctgtttggtgtcttcggtcttatatgggctctctactt

SEQ ID NO: 51217 - DNA, 368 bp, Glycine max
  unsure at all n locations
  Clone ID: LIB3167-007-P1-K1-E11
cccacgcgtccgattcgtgatctgttttgagaatntctataggactgatgccgggtcaaggtcatgaaagataatggcacaatgcattgccatgctgatgaagaagtgtaacatggattttttatcttttggtttcaataaagaagtattcacgtttttcccttcctggccatgcaagattgcttgccaaaaacttattggatgttggaagtttcctatttattatatttaggactcatctgttccatttgtaattttttttatggaagttctattttttagaattgttgtcacgtacaattttttttatctaactttttttttagatttttttttctttatattatttttttgtgaaatattttttt

SEQ ID NO: 51218 - DNA, 365 bp, Glycine max
  Clone ID: LIB3167-007-P1-K1-E12
gcttcgcatgacgctacttactgtctacaacataaccatcattagggctgccttcaactcctcattgcatttcccacttcatgtctttcatttacctcttatcctaagtctcctgctttctttctttcccattttctatctccatatcataccaaagcctttttcattctggccaaattgtctgtgccattcttcatgtaccttgattgtcttggctctgttctgaaaagggtttgtctgcctcatcagaattacctggaattcttggggaagtttctatccttgtctcgttctgaactggagtgtgtctacagatttttaaggtttgctcttttcttacttcagcatactcctttgagtaaatg

SEQ ID NO: 51219 - DNA, 373 bp, Glycine max
  Clone ID: LIB3167-007-P1-K1-E2
cccacgcgtccgatttgagtatatctattatagtttactactcaactaagatggactcgaagaggaagatagcattacttatttcaggccttctggccatgctcattttaatctcctcagatgtggcagccagagaattgaaagaggtcactggtgctggcttgtctggtggtcgtggggtcaactatggtggctttggtggtggctcccctggctttggtggtggcttccctggctttggtgttggtagcttccctggctttggtggtggcggcggcttccctggctttggtggtggcggcggcttccctggctttggtggcggcggcttcactgtctttggtggcggcggctttcctggctttggtggtgg

SEQ ID NO: 51220 - DNA, 378 bp, Glycine max
  Clone ID: LIB3167-007-P1-K1-E3
cccacgcgtccgttttcttctaaaaaaatttaattaagaaattttcatggtaaccattcgtgcagatgaaattagtaaaattatccgtgaacgcattgagcaatataatacggaagtaaaaattgtaaatacgggtaccgtacttcaagtaggcgacggtattgctcgtatttatggtcttgatgaagtaatggcgggtgaattagtggaatttgaagagggtactataggcattgctttgaatttggaatccaaaaatgttggtgttgtattaatgggtgatggtttgatgatacaagagggaagttcagtaaaagcaacaggaagaattgctcagatacctgtaagtgaggcttatttgggtcgtgttataaatgc

SEQ ID NO: 51221 - DNA, 374 bp, Glycine max
  Clone ID: LIB3167-007-P1-K1-E4
ctcccatcatagaaaaccgaccctctcctttccctcttcaccaaccaatggctcccccaaaggccgagaagaagcccgcggagaaaaagcccgcagagaaggctccggcggagaagaagcccaaggccgagaagaagatatcgaaggaaggaggaagcgagaagaagaagaagagaacaaagaagagcgtggagacctacaagatttacatcttcaaggtgctgaagcaggttcaccccgacatcggaatctcaagcaaggccatggggatcatgaacagtttcataaacgacatcttcgagaagctcgcccaggagtcgtcgcgattggctaggtataacaagaagcctaccattacttccagggagatccaa

SEQ ID NO: 51222 - DNA, 376 bp, Glycine max
  Clone ID: LIB3167-007-P1-K1-E5
cccacgcgtccgcccacgcgtccggaactgtgcttgctgaggccattaacatagaaggtttatccttggacaaattccttgaaaatcaagtggccaacaatggttgggttattgagaagagccaaggtagggctcaacttattgtcctccctagaaatgaatttaatgacccagctttgaagaaaaatgccgcagacagtgtaccattggagcacattactcgcatcttccctattcttagttgatttttctatggtagactgccaattttgtttcctgaaggagatcatgcaaatattatatcagttggagcaacatcttcccttccccttgtatgcttcaatttgagaattagtggacagctattgtagtttac

SEQ ID NO: 51223 - DNA, 374 bp, Glycine max
  Clone ID: LIB3167-007-P1-K1-E7
cccacgcgtccggttagacaaacttggtgcagatacctttggctctctacatgttaaccctgatggaatgcttccaaatcacattcccaaccctgaggacaaaactgccatggcactcaccagagcagcagtgctacaaaactcagctgatcttggaatagtttttgacaccgatgtcgaccgaagcggcgtggttgatagcaaagggaatccaataaatggcgacaagctgattgctctcatgtctgcaattgtgctgagggaacatccaggatcaaccatagtgactgatgctcgtactagcatggcactcactagattcataactgatagaggtggtcaccattgcctataccgtgtcggatacagaaatg

SEQ ID NO: 51224 - DNA, 374 bp, Glycine max
  Clone ID: LIB3167-007-P1-K1-E8
ggaaatatctctcacgagtttgtattaggagagaagcggacatgaagaagcaattagcatcaaggcgtttgctgatgtgggttatggtacatttgagcatttcaggagtgttgtccaagtccaaccacaccacaactacaacttctctgctgtgcgatggctccgtagaggactgcctcaacgttcaccacttggactcacagcttcccaccatctccagcacccacttccgcagaatcctcgctggagaaaaatgctgcagaggtaacactcagactgcaggtacaggtgatcccaataatcccaacttctgttcgaccgcaaccggttatcgtaagtgtggggccgcaactgatcctggtcaacccaaccga

SEQ ID NO: 51225 - DNA, 328 bp, Glycine max
  Clone ID: LIB3167-007-P1-K1-F11
aaagcacattctatcgccatcatatagcacctaagatactcatgccgtggatgagacgctcgtcacatcaggcgagctttcactgttagaaataacacatgcagtcttacttttgaatattgatacatctgatacgcattcgaaacttatgcccaaatgctctcacatgcaagcacgtatagcgacatacttttgatgtcgtgcacattcacaacaactacaaaatccatcgctatgatgcacccaaaaggatttcaaacagacgctatataggacagtgctatatttgaagccacaagaaccagctataggaggttattcgactatt

SEQ ID NO: 51226 - DNA, 376 bp, Glycine max
  Clone ID: LIB3167-007-P1-K1-F12
caaccacattattgctatcatcactcatacctgcaagcatcccatcattcaactctggaaaccattcagtttttttgcttcaaaaccgttctttgaatcgacccaagaagagagtttccttcgttgttcaagcagccaagccccctattggtgtggaaattccaaaggtgcagcctcaatttaagcctccgtttcttgggttcactaagactgcagaagtatggaactctagagcttgcatgattggaatcattggagtttttattgtagagtttataataaacaagggcatacttcaagtgattggggttgatgttggcaaaggccttaatattcctctctgaacattatttttggctgtgctcgtaaatgttgt

SEQ ID NO: 51227 - DNA, 397 bp, Glycine max
  Clone ID: LIB3167-007-P1-K1-F2
aaaacacaagccaagtgaaagtgagaaaaaataaaaatcaaagagcataatgtcagggatcattcacaagattggggagacccttcatgtgggagggcacaagaaggaggaggagcataagggtgagcaccatgctggagaatacaaaggggagcaccatggtgaacacagtagtgagtacaaaggagagcatcatggtgaacacaaagctggagagtaccatggtgagcacaagccagagcacaaagaggggttcctagacaaagtcaaggacaagatccatggtgagggcggcgccgccgagggcgagaagaagaagaaggagaagaagaagaaggagcatggccatgagcatggccatgacagcagcagcagcagtgacagtgattaaactgct

SEQ ID NO: 51228 - DNA, 373 bp, Glycine max
  Clone ID: LIB3167-007-P1-K1-F3
cccacgcgccgccgggatcatccacaagattgaggagaccctccatgtgggagggcacaagaaagaggagcacaaaggagaacaccatggtgagcacaaaggtgaacacaaaggagaacaccatggtgagcacaaaggtgaacacaaaggagaacaacaccatggggagcacaaggagggacttgtggataagatcaaggacaagatccatggtgatggccatgacaagggtgagaaaaagaagaagaaggacaagaagaagaaggagcatggacatgaccatcatggtcatagcagcagcagtgacagtgattagatcttatatgttaagcaggtgtacggtacgatggtagtgaggagccagaatccctct

SEQ ID NO: 51229 - DNA, 379 bp, Glycine max
  Clone ID: LIB3167-007-P1-K1-F4
gattgagaagagaaagcgttccaaaatgttcacgctatctcgcgtgttccctctcacttccccttccaggcataggctcttggaagtgctgtcctctaggaaagttgaagtcggagaccgtctgcgccaagaggggcgcgattttacctattcagctgccatttctaccgctacaaataactatgctgccaaaggacacgcttccgatcgaatatttgctccttatactgtttacaagggcaaagctgcattctcgttgattccttgtcttccaactttcactaagttggattctgggactgttgtagttgaccgacgcggttcaatcatgatgtctttcatgcattctattggagagcgcaaatatgactgggataaa

SEQ ID NO: 51230 - DNA, 290 bp, Glycine max
  Clone ID: LIB3167-007-P1-K1-F6
ctgacccgtcgactcgctcggacgacaccaaacgagccctagctgaagctcatcataagctgatattcgccacacacgccctctccgacacttctactatgggctccctgcacgtggctaagtccctagtgcgcacccatggttacaccgtccggaatcacaacaatgagtgcggtcttatgtctgacactgatggagccacgtccatgggacagctgtgcttccgccaagaggacgccgaatgctatctcgctcacgttcgatcacggagtagagagcttagaagcagg

SEQ ID NO: 51231 - DNA, 361 bp, Glycine max
  Clone ID: LIB3167-007-P1-K1-F8
aatgaatacaacgagttgccgtgttgtttaaagaatgctacaggatatgtgaatgtcctggtgccaatgatacagcttcagcccacttcatcttacaattgcatcagaatgggctgcttaaaggggatgatgttacagatcactttttccgacaattgatggaactagctattgcacattgcttatccactgaggtgattaattcggggtcactgcaatctcaaccaccgacaatgtcatttcttgcaattgatatttatgcaaagcttgtcttctcaatcttgaagggatcaaacgaacttgttcttctttccaagattatggcagttcctgttcgtttcattataaaagatgcagagga

SEQ ID NO: 51232 - DNA, 376 bp, Glycine max
  Clone ID: LIB3167-007-P1-K1-F9
cggacgcgtaggcacgcacttgagttctaagaagaaggaactggcttcgtgaatggtctccctcgcagctgtacaccaccgtagacgcttcctagtgccgtcatggttgcatccattaaccgtgctcaaatccaaggctggctcgcccacgtggatgacctacaatgacatgaccttcatcgctcgacgccgtcgtagagagcaaagcatgcatgtgtgtgaaccaaaccacacgaagaagatcaagactcatgactacttgccggaccgacctgatgcgcaagcggcgcaggaagtcgactacctagcttggattggttgaatacctcgcttgcaattccattcaaaacactgttatgccgaccatgagcacaac

SEQ ID NO: 51233 - DNA, 213 bp, Glycine max
  Clone ID: LIB3167-007-P1-K1-G10
aggaggcgttggctcacgcagagcttgatgtggactcattcgtataaggcgggaatctatgcatgtctcgttgggcaattacgaagaacatccatttggcacgagcctggctaactgcgaatgcccttgagtgatgggctacctttaacaggctggcatattgcaacccaactgcggagactttgcgagggactgtgacatcaaataacgatg

SEQ ID NO: 51234 - DNA, 330 bp, Glycine max
  Clone ID: LIB3167-007-P1-K1-G11
gccaagcgttggctcactctgcgctggaaggggaaacattcgacaggtagcgtatctataatggcttctatggctgctaagtaaaacgtcccaatggcataagcatggaaatcttctacagcaattgagtatggtgctaccttgaagaagaaggcagagaggatccgaacttcagacactttccacaggccgaggacatacattaaggataggtacgccacgtacccttgcattaactcgcctacaatgaataagcgtgagcattatcatataccgtgataccatgcgaccactgaatccgtcatgaagaacattgaggacaagagcact

SEQ ID NO: 51235 - DNA, 379 bp, Glycine max
  Clone ID: LIB3167-007-P1-K1-G12
cggacgcgtgggcggacgcgtgggcagccgcatcccccaccactttctctctcctccactccgccaccccttcctcctcctccaccgccacctccgcctccccctccccctcgcgcgtgcagctcacctcctccctccgcgcccgcccgctgcgccgcctgggcttcgccgcggcggacccgctgctcgcggcgagtgtagcggcgcgcgtggcggcggtgagaggaggaggaaagggcgcgaggggggtggtgtcgatggcgaagaagagcgtgggggacctgagcgcggcggacctgaaggggaagaaggtcttcgtcagggccgacctcaacgttcctgtcgacgacaaccagaacatcaccgacgacaccagaat

SEQ ID NO: 51236 - DNA, 380 bp, Glycine max
  Clone ID: LIB3167-007-P1-K1-G2
cacaaccaaagcaacaccccaaatggcttcagcttctgttcccatggcgttgtcactgagctctgttaccaacaacaacaagccttcatccgaagccttcttcaggccactacccctacgccaaccaaagaggaccctcttcaccacgaaggcagtgtcaaactccaagcctcaaatcaatgcatctttgaaggagaaggcagttgccggactcacagcagcttctgtgacagcatctatggtggttccggaggtggctcatgctgctggatatgagttctccccttccctaaagaactttctactcagcatctttgctggtggggttgttctagcagccatatttggagccgttattggggtttccaactttgatccgg

SEQ ID NO: 51237 - DNA, 338 bp, Glycine max
  Clone ID: LIB3167-007-P1-K1-G3
tttgttgtttgtgtgtttgttttttctctcacctgaaaatgtcttgctgcggtggtaactgtggttgcggaagcgcctgcaagtgcggcaacggctgcggaggctgcaagatgtacccagacttgagctacaccgagtcaaccaccaccgagaccttggtcatgggagtggcaccagttaaggctcaattcgagagtgctgaaatgggtgttcccgctgagaacgatggctgcaaatgtggagctaactgcacctgcaacccctgcacttgcaagtgaggtgttggagagctaaagctttaagcagagatggcccttagaaataatgataaaaactat

SEQ ID NO: 51238 - DNA, 378 bp, Glycine max
  Clone ID: LIB3167-007-P1-K1-G4
gtttcgctttggcattcacagcttcttctacttgctgctcaaatctacaatctcagtctctgttattcgctgctgctgcattgagatcaaaaccgtgtctctctctctgcaacacttatcgacccaaacgcattcggaagcgttctccaattgttggcgctcaatctgaaaacggagctctcgttacttccgagaagcctggcactaattacggaagacaatacttccccctcgctgctgttgtaggccaagatgctataaaaactgctcttttacttggggccattgaccctgggattggaggaattgccatatcaggaaagcgaggaactgccaaaactgtaatggcacgtggactgcatgcaatactgcctccta

SEQ ID NO: 51239 - DNA, 378 bp, Glycine max
  Clone ID: LIB3167-007-P1-K1-G5
cccacgcgtccggtgagctcaactttaagacactagtggatggtctgggaaatgttttgtatcagtatccatttaatgttccagcatactacgcattaatatttaggtctctaactgttttagaaggtttagcattgtatgctgatcccaattttaaggtacttgctgcatcatacccatattttgctaaaaggctcctaacagatccaaatccatatctaagagatgctcttattgagttgcttttcaaggatgggaagttcagatggaatagacttgaaaatctgctggaccaggggaaaaaggatagagatttctctgctaaagaagctttacatcctgtcctaaaggtattattgagtccagatggtgaagagc

SEQ ID NO: 51240 - DNA, 194 bp, Glycine max
  unsure at all n locations
  Clone ID: LIB3167-007-P1-K1-G6
caggcgtccgcccacgcgnccggtgagctcaactttaattcactggaggatggactgggaaatggggtgtgttcannatatatttgatgtcccaccatactattcattaaaatataggtctcttacagtatctagaaggtcaagcactgtatgttgattcaaattttattgactagctgtattatctcaaattt

SEQ ID NO: 51241 - DNA, 376 bp, Glycine max
  Clone ID: LIB3167-007-P1-K1-G7
aaagaaaatcctcaattttctgagcagccaaacactctctctctgtctctcgaaaattctcagtttgcagagaaaatctgaatcatgtcgtggcaagcgtatgtcgacgatcaccttctgtgtgacatcgaaggtaaccacctcactcacgctgctatcatcggccaagacggcagcgtttgggctcagagtaccgacttccctcagttcaaacctgaggagataactgccatcatgaatgactttaatgagcctggatcacttgctccaactggattgtatctcggtggcaccaaatatatggtcatccagggtgaacccggtgctgtcattcgagggaagaagggtcctggtggtgttactgtgaagaagaccg

SEQ ID NO: 51242 - DNA, 376 bp, Glycine max
  Clone ID: LIB3167-007-P1-K1-G8
ctgcaccggagcccttctcgccggcggcctctactggttcgtctgtgttctgggccccgccgagcagaagggcaaacgcgccaccgatctatccggcggctccatctccgccgagaaagtccaagacaactacaagcagtactggtccttcttccgccgccccaaggagatcgagaccgccgacaaagttcccgacttcgtcgacaccttctacaatctagtcaccgacatctacgagtggggctggggccagtccttccacttctccccctccatccccggtaagtcccaccgcgaggccacgcgcctccacgaggagatggccgtcgatctcatcgaggccaagcccggcaacaaaatcctggacgtgggctgc

SEQ ID NO: 51243 - DNA, 374 bp, Glycine max
  Clone ID: LIB3167-007-P1-K1-G9
cttctgcgaacccatgctcacaaattttttcccagtgtgctgctcagctagaacaatctcaaaagtcgattgacatttatgaccagatagctcgccaatccctcaacactaacttgctgaagtatggagctaaaggacaccctcttaatgctggcatctgccaactatgtcaagaggacgttggtgctataaccaatgcattagaacgatatccagaactggatccaacattttcaggagacacgtgaatatagattgttggcggacattgctgctgcaattgatgaacaagatgttgcaaagttcactgatgttgtcaaggaatttgatatgtttaccgctctagattcttggcagaccacacttcttttaag

SEQ ID NO: 51244 - DNA, 328 bp, Glycine max
  Clone ID: LIB3167-007-P1-K1-H10
tcctcacaaaaatttaattttttagaaacttagtattaaaagaaacaaaatttgttgtaatataagagaatctattctctttctttgtcgttttttaattatcttggagattttataatgcttactctaaaactatttgtttacacggtagtgatattcttcgtttctcttttcatcttcggattcctatctaacgatccaggacgtaatccagggcgtgaagaataagaaaaaggtggattctgtgtttttcttgcttgtgctggattttaaaatatttttaggattttctttattttaacatctttaacttagataaaatataaaa

SEQ ID NO: 51245 - DNA, 261 bp, Glycine max
  Clone ID: LIB3167-007-P1-K1-H2
cccacgcgtccgctaggtgctctttgagtgcagtggttacaggataaggaccattcatgtcgagaagcaggttataacaacttgaaacgcctggctgaagaatttggcactgggtggtgctatgcagcacatatttgcttaggagccggagatgaacaacagcccacactatttgcatcgaatgactattcgatgagctatctctctagctgcttttgtgatgggcccttaatttacgtgtttaaacttgttaccagttgt

SEQ ID NO: 51246 - DNA, 340 bp, Glycine max
  Clone ID: LIB3167-007-P1-K1-H3
cttaaatatgctgcagatgctgcatgcactgtactacgtgtggaccagattattatggcaaaaccagctggtggtccaaggagagagcaacctgctggtggcatggatgaagactaaaattaatggtttgctttggccatgtttgtatctcaacatgatggcttgaatttgccttgggcatgttttctttatttagactttagtattggtggcgatcttacaaattttgaattttgttttgccatgaaatacaaagagatgtggtctgtaaatctacattttattcatagcccttgtgagtgatgttaataaaaatattttttttaaaaaaatttgtgct

SEQ ID NO: 51247 - DNA, 280 bp, Glycine max
  unsure at all n locations
  Clone ID: LIB3167-007-P1-K1-H4
cccacgcgttcggatgcagggcacataaacttattcaaactattactggctaagtttgagagggaagattccaaccttgatatatgcatggtaagttcgatatgataatcatatcctacaagaacacccgtgttcgtataatttacacaccggaaggtataatacgtcaaaattggttgcacaagtataaactttgtattttgggttgagtagaatttgagtgagttatttatccattgntttttataaatataaattatttatttttttttaataattt

SEQ ID NO: 51248 - DNA, 342 bp, Glycine max
  Clone ID: LIB3167-007-P1-K1-H6
aggaagcctaagccgatagctgccaattgttttgagacaccaattctctcatacatgaggagagggacacatgcggagttttcaggggctacaagatcagcaagttgaccaactgcgctaccatatacgtgcgaagagcaagtgatggacgcaggaaaccggaaactactcactagtatatgacatccattatgaatagtacacaatagatcaggtggtgtgaagtgtccacttatatgacccccctcctctagtacgagagatttgcactcggatagcgtataacttgagtcagcgttgcaattagtcagtttgagtgtcacatagttcaatctactttat

SEQ ID NO: 51249 - DNA, 373 bp, Glycine max
  Clone ID: LIB3167-007-P1-K1-H7
cccacgcgtccggcggaatctgctagaattttctaataatggcgaaagacgttgagcaggtcacagagcaaggtgaatactccgcgaaggactaccatgaccctcctccggcaccgttgatcgacccagatgagctcacaaagtggtccttgtacagagccgccatagctgagttcatagcaacactcctttttctttacatcaccgtgttgaccattattggctacaagagacagagtgacaccaaaatccccggtaacaccgaatgtgacggcgttggcattttgggcatcgcttgggccttcggtggcatgatcttcatccttgtttactgcactgccggaatctctgggggacacatcaaccctgcggt

SEQ ID NO: 51250 - DNA, 374 bp, Glycine max
  Clone ID: LIB3167-007-P1-K1-H8
gagacggttggtgtgaagtggaagaggaccttctgtgcatcataccaaagaaattgagtgacattatgcattgaaagtatcaagtaacaaagcaagcaggttgaggaggttaccagtatatcctaaagtatagaacttcaattagttgttccttcagtctctctagagtaaatttgaggcttttcctcggctaaaatctatgttcactttatacaagttaccactaaatactatgtttcctctactcaatttgcaccctgctccaaatgactatgagtttgctgacgcactgacgttgtagcagtttcaaatgatgaattttgtcaccaggaaattgtgctgttgtctaatattgtggcaattattcctttgct

SEQ ID NO: 51251 - DNA, 240 bp, Glycine max
  unsure at all n locations
  Clone ID: LIB3167-007-P1-K1-H9
cngacgcgtgccaaggcaaactatatgtcgcccaattcgccgctcatgaggaagggcgtctcacgtcgcatggcatttactaagcgacagctcgccaatccctcaactcttatccgctgaaccatggtgttaaacgacaccttcttaatgctggcatatgccaacaatataaagaggacgctgctgctataaccaatgcatttgcacgatatactgaactgtatccaacacttttaggac

SEQ ID NO: 51252 - DNA, 333 bp, Glycine max
  Clone ID: LIB3167-008-P1-K1-A10
attaccttccctcgtatgcactttttcatggtgggttttgccccactcacatggggtggttcccaacagtacagagctcttactgtacccgaattgacccaacaaatgtgggatgctaagaacatgatgtgtgcagctgatcctcgccatggtcgatacttgacagcttctgcgatgttccgtggtaagatgagcacaaaggaggttgacgaacagatgatcaatgttcagaacaagaactcatcatactttgtggaatggatccccaacaatgtgaaatccactgtctgtgatatcccttcaactggtttgaaaattggattaacctttatt

SEQ ID NO: 51253 - DNA, 367 bp, Glycine max
  Clone ID: LIB3167-008-P1-K1-A11
ctcaaggctctctttcaacgatcgttctcttatcctcagcaatgcttacagtatggtaattcaatgcgtaatgggttggcaatggatttaaaccaaatccagttagctttacgctcttgtggacgctttcaagctatcaaacatgccaaatcactccattctcttataataaaactttgccttttcaatcacgtttttctcctaaacaacatcatctctgtctacgccaaatgttcccatttcaatgatgcacgaacccttttcgacgatatgcctcagaggaacataattttctagacaacaatggtctctgcaatcaccaattctgggagaccccacgaggctcttaccctctacaaccacatgc

SEQ ID NO: 51254 - DNA, 361 bp, Glycine max
  Clone ID: LIB3167-008-P1-K1-A12
cggacgcgtgggcggacgcgtgggtttccgccgacgagaccacagaggcaccagcgaaagtagaggctgcaccggtcgggttcaccccaccagaacttgacccaaacaccccttccccgatcttcgggggcagcaccggcgggctcctgcgcaaggcacaggtggaggagttttatgtcattacgtgggactcacccaaagaacagatctttgaaatgcccactggcggcgccgctatcatgagggagggtcctaaccttctcaagttggccaggaaggagcagtgcttggctcttgggactaggctcaagtccaagtacaagatccagttccagttctacagggtcttccttaatgggga

SEQ ID NO: 51255 - DNA, 325 bp, Glycine max
  Clone ID: LIB3167-008-P1-K1-A2
tcgcaacaaattatatttttcttacaaaaaaaatggcaggtgaggtggtgaagaaggaagagtctctcaacctgaaagtcactaacaagagccatgttcaatcagaggagaaaattggaagaaaagagtaccaattggtcacttttgatcttccctacttggccttttactacaaccagaagctcttgttttacaagggtgaagatttcgagggcatggtccaaaaactcaaagttggacttggagtggtgctgaaggagttccaccaacttgctggcaagttagggaaagatgaagagggggtgttcagagtggagtatgatga

SEQ ID NO: 51256 - DNA, 235 bp, Glycine max
  unsure at all n locations
  Clone ID: LIB3167-008-P1-K1-A3
ttgcaacnattatatttctcctacttttaaatggcaggtgacgcggttaagaatgaagagtttctcaacctgaaagtcactaacaagagccatgttcaatcagaggagaaaattggatgaaaagagtaccaattcatcacttcctatcttccctacttggccttttacttcaaccattaactcttgttttacaagggtgaattatttcaagtgcatgttccaaaaactcaaagtt

SEQ ID NO: 51257 - DNA, 372 bp, Glycine max
  Clone ID: LIB3167-008-P1-K1-A4
gccaggcgtacgctcatacacccgaaattacaatatcagccgttccattaaacctggctgcctgaacaaggattaaaataatcatccgcacacttatacagacagtatatcatctgagaaactgaagtaagatagtgagactaataaaggtatatccatagcgctagatccacgcatccggaatctggaatgaaatactagacgtgtatgacgtatcatgctatactgaaagagtagaacatggagaaaatcatacatgccatatacactaataaacttatgaagataccagccaagagtgtacgtgtgaataaagccatctacaactcaaaagatgataaagctagacctaatgagagattaacagagaga

SEQ ID NO: 51258 - DNA, 367 bp, Glycine max
  Clone ID: LIB3167-008-P1-K1-A5
gaaaaaaactctgatctatgcctatgtctctgactctgtcaaccgtgcctgcggtcaattctctcacaatggctgaatcctgcctcctatctctcccttccctcttctacgccaaaaacaaaaccctgtctctctcaattcccactaatcctctcaacctgcaatgcccatgctcaaactcttcgttttttgccctcaccaccaagactacgcgccactcttctgttctcacattcgtggctcagacatctggttgggccaaagaaggggaggaggaagaagccgcgtgtgagaaccaaggccacactgcgtggggaactgaagaaggtggcgatgatatatacgatggcggcgaatggggtttcgc

SEQ ID NO: 51259 - DNA, 267 bp, Glycine max
  Clone ID: LIB3167-008-P1-K1-A6
ggctaagctctttgcgggtactctctaggcactctatgccgtttacatacttcaaacagtggtaatggctgctaatgaacaaggaggccacttgtatgacaacaacagcaaatatggatgtggaagtgtcaagagttaccaatgcccatcacactgctcgaggagatgtatccagacccaataccacaagccctgcatgtatttctgtcagaagtgctgcaggaaatgcctgtgtgtgcccaccgactattatggtcatcaagctgg

SEQ ID NO: 51260 - DNA, 102 bp, Glycine max
  Clone ID: LIB3167-008-P1-K1-A7
cacgcgtccggacacacgtccgcccatctaattttttaaatcatcgtttaatgagatcaagaaggtgcatttctaacggtacctgtatcaaattaaaattgg

SEQ ID NO: 51261 - DNA, 295 bp, Glycine max
  Clone ID: LIB3167-008-P1-K1-A8
attcccttccctcgtctgcactttttcatggtgggttttgccccactcacatggcgtggttcccaacagtacagagctcttactgtacccgaattgacccaacaaatgtgggatgctaagaacatgatgtgtgcagctgatcctcgccatggtcgatacttgacagcttctgcgatgttccgtggtaagatgagcacaaaggaggttgacgaacagatgatcaatgttcagaacaagaactcatcatactctgtggaatggatccccaacaatgtgaaatccactgtctgtgata

SEQ ID NO: 51262 - DNA, 308 bp, Glycine max
  Clone ID: LIB3167-008-P1-K1-B1
cccacgcgtccgcttacaacagtttgcaaactacagagggaagggtattgaggagaggaaactacgggtagtcctcatgaacccaccatcttctacggtgttgcttgcactaaacggtgatctgaaccatgatccatccaaccaaattcatgtgcaaaaagatatgttgcccagaggagtctaaaacatacctactcattgtaaagattccgcggaggtttaaggtttggagccagcctaagatattactgaggatacagcatatgaagatattgtcccaagacaagctgagaatgtatgctacatga

SEQ ID NO: 51263 - DNA, 370 bp, Glycine max
  Clone ID: LIB3167-008-P1-K1-B10
gtgaaactgttgatgaggatctcataaaactgcactcagtatgctttgtcaatggtatggtctgtgtgtaagctttcacctgaagagtgctcgtcgattgcggttgatgcagggcttgctgcgaaactcctactcgtgattcagagtggttgcaatcctatattgaaacagcagtctgctgagcttttgaagctgtgtagtttaaattattcagatactatctttctttccaagtgcaagcttaccagaaccatccaatgatcatggactatatcaatctggtggtgccaacaatttgtaaatttgtggggcaagagtagtaaagatcagttgcatctcaagaccaccgaactctaataaaccccaagac

SEQ ID NO: 51264 - DNA, 338 bp, Glycine max
  Clone ID: LIB3167-008-P1-K1-B11
gataactagaaacagtgtgatgaaaatgaaggtccttgttttcttcgttgctagcaattttggtagcatggcaatgccatgcgtacgatatgttccctctccgaatgaacactggctatggtgcccgtactccggaggtgaaatgcgcaagttggaggcttgctgtggaagcacacaacatctttggctttgagaccattcctgaagagtgcgttgaagcaacaaaggaatacatccatggcgaacaatatagatcagactccaaaacagttaaccaacaagcttacttttatgccagagacctcgaagtccatcccaaggacacatttgtgttcagt

SEQ ID NO: 51265 - DNA, 71 bp, Glycine max
  Clone ID: LIB3167-008-P1-K1-B12
tgcaaggtctaaggataaagcaatttgcctgtggggatagccactgtttggcagggaccatggaaggggag

SEQ ID NO: 51266 - DNA, 373 bp, Glycine max
  Clone ID: LIB3167-008-P1-K1-B2
cccacgcgtccgctttcaacagtttgcaaaagacagtggaaagtttattgaggagaagaaactacgggtagtcctcatcagtccaccatcttctccggtgttgcttccagtaaatggtgatatgaagcatgatccatccaacgaaattaatgtgcaaaaagataggttgcccagtggagttgaaaacatacctccccctcgtaaagtttccgaggaggttaaaggtttggaaccagcccaggatatgaaggaggatagagcagatgaggatattgtcccaagacaagctgagaatgttggtgacatgaagccagcaaaagatgatgtgcagtcgaatttagccaatgaatctgaggaattgaagtcaaaactt

SEQ ID NO: 51267 - DNA, 344 bp, Glycine max
  Clone ID: LIB3167-008-P1-K1-B3
ccgggatgtcaaatctgctctggcagtgattgatgatatgagagctgctggatatgaaccatcaaaagagatgctaaaaaaggtcagacggcgatgcacacgagaaatggacaatgaaagtgatgccagagtgcaatcactggctaattccttgaattaccaattgggttcagaaaaccgacgggacattctgtttaatcttaattacagtatgggttatgcttgaatggaatacctctgtatattagtggatgctgctcaagttggcgggtcaggatgattcaagaacatcttcgcgcaatctttatttttggatttatgtgtttatgaagcggggaggatgc

SEQ ID NO: 51268 - DNA, 370 bp, Glycine max
  Clone ID: LIB3167-008-P1-K1-B4
gcacctgacaacttcaggcttgactttgctgtgagcagagagcaaacaaacgaaaaaggagagaaaatgtacatccaaacacgaatggctcaatatgcagaagagttatgggaattactgaagaaagataacacttttgtctatatgtgtggactgaagggaatggaaaagggtatagatgacataatggtttcattggctgcaaaagatggtattgattggattgagtacaagaggcaattgaagaaggcagagcaatggaatgtcgaagtctactaattaatatcacttgcacttgctcagatatcatgccctactttgtgcagcagcaaatctattttgctgtcatgcgctgtgtagatagattacg

SEQ ID NO: 51269 - DNA, 371 bp, Glycine max
  Clone ID: LIB3167-008-P1-K1-B5
gcggttttccctggcaatatgatacgaaatgcagcgattaaggagttccttaaaaaaaagtatctcaattcacgggctgccattgaagatacttatttttccaccaaggatacttttgagagacatcgcgtggttttcaccgttggaacttccattgcttccgttgccactgcttggttcggttattccttgcgccatttacatgacatcaaagttgatcaaaggcttcaatctatcgaaaattctatgaaaaacaattccaatctccaacattcccaaatcaaagacattgtcgcgggttccgcttccggagcttttagtatccctgcttgtgtcgccactgctggaacctccttaatcatcgggtatgc

SEQ ID NO: 51270 - DNA, 380 bp, Glycine max
  Clone ID: LIB3167-008-P1-K1-B6
agccgtccggggtttcctttcgggttaaggttcagtttaaacttcaaattctaagtgaacccagtgcagctgagtccaaatcccaaatccgaatcaaaatccaaagtgagatttgcgatggagaggcttcaccgaatgtttgcaggtgcaggtggagcgctagggcaccctcccccaaattcccaaactctcgattcctccgagcaggtctacatctactcactcgctcttctcaagatgcttaagcacggaagggctggggttcccatggaggtgatgggtttgatgctcggagaattcgtggacgagtacaccgttcgtgtggttgatgtcttcgcaatgccgcatagtggcactggtgttagtgttgaggctgttga

SEQ ID NO: 51271 - DNA, 257 bp, Glycine max
  Clone ID: LIB3167-008-P1-K1-B7
ggcactcgtatgtgcgaaggttacttgtggaactggcaaaaacaaagaaatgccgtgccatagtgacaattacctgcttgatgaacactgtgaaactcttaaagacgtgaactagagtactgccacattatcagacattctgtaaaaacactgtcaacagtattgactggatataactcgcagaaaggtatctataaaatacatgataaacgaagagtactcacaactagctgatgtaccaccagaccatgtcagat

SEQ ID NO: 51272 - DNA, 266 bp, Glycine max
  Clone ID: LIB3167-008-P1-K1-B8
gccacgattgctctgtaagatttcttgccgacatggtatatcgatcgcgcgggcgggtcttccatgacaaaaacatttcttccatgggatctgaattgctgaaacggagacatcgtgagtcggacaactttaccgtcgtcgctcgggaacttgctaagcgcatggctatagcttacactaagggctaggcatttctctacgttcttatcgatgaagagctcataaatctattggttgtatcatatgacaaggtccgagaatacgat

SEQ ID NO: 51273 - DNA, 373 bp, Glycine max
  Clone ID: LIB3167-008-P1-K1-B9
ctcttaaccctgttgatgccaagaggaggcagggaaagtttaaagccactgatggtcctcttccgactgttccgggctatgatgttgcgggtgtggtggtgaaagttggtagtcaagtgaaggactttaaagtgggtgatgaagtgtatggagatgtaaatgagaaagcacttgaaggtcctaagcagttcggatctttggctgagtacacagctgttgaggagaaattgttggcaccaaaaccgaagaatttggactttgctcaagctgcttctcttcctctagcaattgagactgcttatgagggtttggagaggactggattttctcctggtaaatctattcttgttctaaatggttctggaggagttgg

SEQ ID NO: 51274 - DNA, 378 bp, Glycine max
  Clone ID: LIB3167-008-P1-K1-C1
cccacgcgtccgattaaaatattgtcacaaccaacttcccgaaacattgtccatcatgtggagccgatggatgaaaatggaataggaacacaatttgatgaaaaggttaaaggcattagtcagagaaaatttacctaaaagacaagataaaaacgaatggaccaaaatgatagagaatttgcagtactcaatcttctgtagtacccatggtatctaaaaaaaaacaaaaggtttccaaaatcgattacctaatgacaaaaaatagtaggagtaaattcatagattagtcttccaatccccttattatttgaacaagaaagtctagctgcggtagttacttatacatggtgatatattacaatgacaatacaaacatgc

SEQ ID NO: 51275 - DNA, 359 bp, Glycine max
  Clone ID: LIB3167-008-P1-K1-C10
cggacgcgtgggtctatattcattttggcatcgaggttgaatctcatcggagagagaaaaaccataaccatgtctggaagaggaaagggaggcaagggtctcggaaagggaggagcgaaacgacaccgtaaggttctgagggataacattcagggcataacgaagcccgcaattcgccgtctcgcgagacgtggcggcgtgaagcgtatcagtggtctcatctacgaagaaacccgcggtgttctcaagatcttcctcgagaacgtcattcgcgacgctgtcacctacactgagcacgctcgccgcaagaccgtcactgccatggacgttgtttacgccctcaagaggcagggcaggac

SEQ ID NO: 51276 - DNA, 355 bp, Glycine max
  Clone ID: LIB3167-008-P1-K1-C11
cgaataagatagataggtgaaaatgtcgcagtgtgtggccaacacattcgtgcgaggaaaaccctttcttccagttgcagcagctcccactaaaaatgttcggagagcggttcagtgcggtgtgtggtgcaagaagaaggagatacacccgcaattctacgaggaatcgaaggtgtactgcaacggggagctggtgctgacgacaggtgggacccagaaggaatacgtggtggacgtgtggtcggggaaccaccccttctacctcggaagccggtcggcgtctatggtcagcgactaccaggtcgagaagttccgcaagaagttcggggagctcaaagagatcatggagatttct

SEQ ID NO: 51277 - DNA, 367 bp, Glycine max
  Clone ID: LIB3167-008-P1-K1-C12
atggcttctctggcaagcttagctgttgttcaaccatctactgtcaagggcctggctggaactaagctctctttcaagccctctcgccagagcttcagacccaagaatttcaggagtggtgccgttgtagcaaagtacggtgacaagagtgtgtactttgatttggaggatctaggcaacactactggtcagtgggacttgtacggctccgatgcaccttcaccctacaaccctcttcagagcaagttcttcgagacattcgccgctccattcacaaagaggggattgttactaaagtttttgatcctgggaggtggttccaccctggcatacttgagtgccacagcgtcaggtgacattctaccaa

SEQ ID NO: 51278 - DNA, 376 bp, Glycine max
  Clone ID: LIB3167-008-P1-K1-C2
cgacgacaaagccaaagccaaggccaaggccaaggtcaaggtcacttccgccgccgagcaggaccaccgcaaaaaagttctccgcgaactcaactccctgatctccggctcctcctcctcctccgccgcctccgacgacgtcgacgaggaggtcaccgacaccgagtggttcttcctggtctccatgacgcagtccttcgtcaacggcggaggacttcccggacaggccttcttcaactccgctccggtgtgggtcaccgggggcgaccgtctctctgcctcggcctgcgagagggcgaggcagggacacgtgttcgggctgcaaaccctggtttgcataccgtccgcgaacggcgtcgttgagctggggtccacc

SEQ ID NO: 51279 - DNA, 342 bp, Glycine max
  Clone ID: LIB3167-008-P1-K1-C3
gacttatcttactacccatacaacaaccacatctattctatactctattaggcaaaaacaccaccaaatgggagaggaaaaggagcacctaagaatgacaccagaaaaagcccgaggaggtagcccccaagaaagacgacggacccatcctgtcgtttacaaactcacttgcattgcagggatgcgtaagaagataaaccacctgtcgcacttcaaggtgtggaaaccgtaggcggatctatcgcaacaggtgactgtaccggtaaatggacgccagaagctgcagatagatgccagagaacaaagaaaaggttgatatatatagctccgcgaaaaagaacc

SEQ ID NO: 51280 - DNA, 370 bp, Glycine max
  Clone ID: LIB3167-008-P1-K1-C4
aagagaatggctcaagcaatggcattaatgactagcttacgtggttcctctcaggctgtgttggaaggtagccttggctccacacgcttgaatgtggggagtggaagcagggtggcctcagtcacacgtgcagggttcacagttagagcacagcaacaacaagtgaatggtggtgaggtacaaagtagccgtagggcagtgctttcacttgttgctgctggtttgaccactggctcttttgttcaagctgtgcttgctgatgccaaacctatcaaagttggaccacctcccccaccttctggcggattacctggaacattgaactcagatgaaccaagagaccttaagctgccattgaaagataggttct

SEQ ID NO: 51281 - DNA, 336 bp, Glycine max
  Clone ID: LIB3167-008-P1-K1-C5
aaaaatggcacctgcaacactgtctttttttctcctcctcctgttctcactcagggtggccgtaaccgttagatcgagcgactacgactacgattgtgtgtacactgcatacgttagaaccggttcggtgttgaagggcggaacggactctaagatcgggctgaagctgtacgacaagtacggctactacatctacattaaaaacctcgaagcatggggcggcttgatgggcaagggctacgactacttcgagcgcggcaacctcgacatcttcagcggaaggggaccctgtcttgacggacccgtctgtgccgataacgttacttctgacggatc

SEQ ID NO: 51282 - DNA, 373 bp, Glycine max
  Clone ID: LIB3167-008-P1-K1-C7
cccacgcgtccgtgaaaaggttactagaggaaaaggcaaaaagaaagagaagtcgagccccagtgacaatcagttgcgtgatgcgatatgtgaaattcttaaagaagttaacttcaatacggccacatttaccgacattctgaagaaacttgctaaacaatttgatatggatctcactccgagaaaggcatctataaaatccatgattcaggaagagctgacaaaactagctgatgaagcagatgacgaggacagagaagaggatgctgagaaagatgaagccccatctacaggccaagaggttgaaggctgattgaagagtagacttaactgcttggagataggtttagcaaggtactataaccctaattat

SEQ ID NO: 51283 - DNA, 408 bp, Glycine max
  Clone ID: LIB3167-008-P1-K1-C8
ccgggcgacccacgcttccttccactcttctcttaaaatgtttcataattaaaagtcaaaaataaatagtggtggttctttatttacaatcatttcctacatactatatttaaaattcttaaagaaattatctttaatacttccacatttactcacattcttaaaaaactttctaaacattttcatttttatctcacttcttcaaaatcatttattatattcatttattcattaatatctcttttaactatcttttttaatcatttcacaattacatatattattatatttattatatatttatacttattatcattttcattaaattattatctctttattaatttatatattcttatcttaattattatcaagactatatacttatatttttataatcctttaatt

SEQ ID NO: 51284 - DNA, 358 bp, Glycine max
  Clone ID: LIB3167-008-P1-K1-C9
gccacgaccaatacgtgttatattgcgcaccctctgtatatctcttacgcgtggtcattttcatgaaaagccatctctatcatgggaaccaaatccattaaacggaggaccgctgagtctaagaacacttccatggccgctgtggacccttacctgcgcaagcattgatcatacaccaaggcctccgaagtggtgatccgtcttgtcgtcgtctccgacatcaatctctatggtcctatcgtctaacaagtcgagcgcgacccaacgcattgtgaggtatgatacgatcactagagttaacctttattttgacgacctttaagccttcacacagggccatggctatgatagaagtgac

SEQ ID NO: 51285 - DNA, 121 bp, Glycine max
  Clone ID: LIB3167-008-P1-K1-D1
gtttttctttagtttggaaaaacaaaactgtgctctatgtattttagatcttgagaaatttcagataaactcgtttgtaaaccattttataataatagagaaatgtttgcttattatcatc

SEQ ID NO: 51286 - DNA, 371 bp, Glycine max
  Clone ID: LIB3167-008-P1-K1-D10
cattgggtgttcctgctcttcccctgacatacgtggctcacgttctggcacttggtgccagcatcttggtcgtgctctgggtcctcaattttaggggtggcttggcttgggattctgataacaaggccctcatcttcaatcttcatccagttcttattgtcattggcttactagtccttgggggtgaagctattataagctacaaagcattacccctgaagaaggaagtgaagaaattgatacaccttgttttccatgccatcgcattaatacttggaatagttggaatttatactgccttcaagtatcacaatgaaagtgggattgccaatctctacagcttgcattcatggcttggaattggggttatt

SEQ ID NO: 51287 - DNA, 173 bp, Glycine max
  Clone ID: LIB3167-008-P1-K1-D12
ggagcctggtgttggaaagactgcattctctgaagggctgctactgttatctgtttcctgaatttcatgtgtgacctgtttcatacatacaagaatggcacctgtgatggtgtgaaacaaaatataaaaattatttgaacacgacagttcaattttttgttaatatttttaag

SEQ ID NO: 51288 - DNA, 365 bp, Glycine max
  Clone ID: LIB3167-008-P1-K1-D2
gttctatcaatatcttgtgattgtcatatgatggaactgtttgatttctattagatactaaagttcatatcttcatatgaaaggcagttctttcttccctgattctccatcccctctgttctttctatctactttatggagcactactgtgtcgcttatgcactcaatgatgccatggctctccatggggattgaggaattgtgaatgaaaacagtgggctgacttcctcatgagacacggggatacactccaatagcctatatatggatattatatatcactctagctaaggatcggacgccgctgatactgctaatacagcacgtgtgacgggggcacctgccagctcacttgatgggatgtt

SEQ ID NO: 51289 - DNA, 368 bp, Glycine max
  Clone ID: LIB3167-008-P1-K1-D3
gggatttgggaatacatggtaacggagcagaggaaaagcgtgtggtgtcttcttctgcggtggatcctcaggcctgtaatttgggattagccactcatgaatcaaaatcaatccattaaatcaaaatacctttctcactgttaactcatcaacaatacctaatttttttggttctttttttcacacttacacatattggctttctcttcctcgtacatataaaaggaagaagcaaagcatctttttcttttttcagtattcacgcctctgcccgcttaattttacttctcaactctctctgtgagtgcttctactccttttttttttgtctttccttctttatttatctttctaaattacgaatcaat

SEQ ID NO: 51290 - DNA, 373 bp, Glycine max
  Clone ID: LIB3167-008-P1-K1-D4
ccgagatcgccgggcaagcgggctctctcgccgctggtgggcttgtggtgatcctgagcctttgcctcacaatctatgggatttcatcttttaacgaaggagacccatccactgccccgtcactgaccttgacgggccgcaagaaggagcccgatcagctccaaactgctgatgggtgggccaagttcaccggaggcttcttcttcggaggcatttcgggtgttatttgggcctacttcctcctctacgtcttggaccttccatactacatcaagtgaagaaagtgcttattatctttgtttactttttgttgttattcattctctatgaatggacaatgggtggaaatggatccttatttgtgcaatagagg

SEQ ID NO: 51291 - DNA, 375 bp, Glycine max
  Clone ID: LIB3167-008-P1-K1-D5
cccacgcgtccgcccacgcgtccgaacaaataaagctacttacttctctttctcccagaggtagccatacatctgggacttccttgatgcaacttcaggaattttctggtgtaagaatttcatagcaccccagactggaggagcccttgacaaagaaatacagaatttttaagataaagaaatattacaaaaagaaccatctcagacaagagttaaagatcaaaaccaaccttgtcactggaggtgcaagacaaaagcttaagcatgccttcttgctttcagccagaagttcttctgcggcaagaaaacaagacacagcaccaatgtggctgcttggttcactacccttgtcaaggatcagtccatggtagtagt

SEQ ID NO: 51292 - DNA, 291 bp, Glycine max
  Clone ID: LIB3167-008-P1-K1-D6
gcggccagaagacggttttcataaaattttaaacggaccggtgtcttcggccttcgcggagtgttctatgaactctatcccaagggcacccctctggcctaacacccttgccttcagccttacaaatgggtcctcacttgttgttgaccacaacattgtctcatacggcaattatgcgaccatattcggctactaagatgcaggtgactacatactatacgaatccggaatggactggcacatattccggttcagacattacgacgttaacttccgtgcacacagccgtat

SEQ ID NO: 51293 - DNA, 364 bp, Glycine max
  Clone ID: LIB3167-008-P1-K1-D7
cccacgcgtccgcccacgcgtccgggaagagttttgaagtttaaaccttcaaacccttttgcctttagattctgattctgagtctctgctgctatatatggcgccacgcgtatttcttgtgttggggatgttgctgatggtgtgccttgttaaggtttcgtctgatccaaagagagaagaagaaatactggaagaagaactacattttcccgataacgagccacttattgtgagagacgggaacagaaggctaatgcaagacatagattgtggtgggttgtgcaagacgaggtgcagtgcacattcgagacccaacttgtgcactagggcgtgtggcacgtgctgtgtgaggtgtaagtgtgtc

SEQ ID NO: 51294 - DNA, 372 bp, Glycine max
  Clone ID: LIB3167-008-P1-K1-D8
gagatgttcatcaagcagcattccgcgtcctagcagattttagaaaaggtaagtttggttggactgcactggagaggcctcctaagtgaaggcagatgtttgcttttaaaagcagaactctgaagcttgaattgaaaattacgctagagacgtcctggaactgactgtagaagacaactccacatggtgttggatgaatatggatattgtgattatgaatgacattatggaagggaaaggtgaatgctccctcaagacaatctttggatcctcggggcacacgaaacaaaggatttgaagccatggatgcttcttgttattaccttgtaatttggtctcttttgcatctgtctgactgtctgtatagaacca

SEQ ID NO: 51295 - DNA, 373 bp, Glycine max
  Clone ID: LIB3167-008-P1-K1-D9
atctggtgcacacacattggggcggtctagaccagatcgcagtggttggggaaagcctgaaactaaatatacgaaagatggaccaggagcacccggaggacaatcctggacagtgcaatggttgaaatttgacaactcttacttcaaggacatcaaagaaaaaaaggatgaagatctattggtattgccaactgatgctgctctttttgaagacccatccttcaaggtatatgctgagaaatatgctgaagatcaggaagcattctttaaagattatgctgaagcccatgcaaaacttagcaaccttggagccaaatttgatccttcagagggcattgtgatagatgattctccaaatgcatgggcagagaag

SEQ ID NO: 51296 - DNA, 373 bp, Glycine max
  Clone ID: LIB3167-008-P1-K1-E1
cccacgcgtccgtagttcctccccctgatgggtataagcctccaattagatggccagagagcagagatgaatgttggtataggaatgttccgtatgactggattaacaagcagaagtctaatcagcattggttgaaaaaggaaggggagaaattcatctttccgggtgggggtactatgttccccaatggtgttggtaaatatgttaatttaatggaagatctgatcccagaaatgaaagatgggtccattcgaactgccattgatactggttgtggagttgctagctggggtggtgacttgctagatcgtgggattctaactctttctcttgcaccaagagataaccatgaagctcaggttcaatttgctct

SEQ ID NO: 51297 - DNA, 358 bp, Glycine max
  Clone ID: LIB3167-008-P1-K1-E10
cccacgcgtccgggtagagatttgaagtttaaaccttcaaattaatcaaaccattttaatttgcctttagattctgagtcactgctgctatggcgctacgcgtacttcttgtgttggggatgttgctgatgttgtgccttgttaaggtttcatctgatccaaagatagaagaagaaatactggaagcagaagaagaactgcagtttcccgataacgagccacttatcgtgagagacgcgaacagaaggctaatgcaagatatggattgtggtgggttgtgcaagacgaggtgcagtgcacattcgaggcccaacttgtgcactagggcgtgtggcacgtgctgtgtgaggtgcaagtg

SEQ ID NO: 51298 - DNA, 371 bp, Glycine max
  Clone ID: LIB3167-008-P1-K1-E12
acaaaaacaaacaaaacaaaaaaaaaaagacgcgagagaacgtaaaatcactatggctcctctggctattggaaatatcagatcatcgaaccaaccaaacgaaggcagaaacaggcaaagagctcatagaaattctcgtcctcttcctacataagtcttctcttatcataaacgcgtgttgctcggataaggttgtgctgcggtgattcactcgtactttgcttaatatggcggttgagaagttgagcattgcaaaagatgtgactgaattaattggcaaaactccattggtatatctcaaccgcatcgtggatggctgtgttgccaaagttgctgcgaagctagaaatgatggaaccttgctccagtgtc

SEQ ID NO: 51299 - DNA, 408 bp, Glycine max
  Clone ID: LIB3167-008-P1-K1-E2
gcaaaatggttcaagaattttctcaagtatatattagaatttaggtaacttatgatgggatgaataatgtaatggaatgtatttgccatgtttaactttaaataactggaccattttgaaaaaaaagtcatgtttcttttgttgtgttttctggaccatcttgaatgagggtatatttatttgttaaaaatattaattaattttttaataaaataaaattatattaacattataatataatgatttttattattttatatgtcaaaattttatcttattaaattttgttgctgttttaggtgtagggtgcctctttttcttaaatgtactcctaaattttactatttcttcttttattttctctatcttattttacttatttttataagttttaacctttattatatt

SEQ ID NO: 51300 - DNA, 370 bp, Glycine max
  Clone ID: LIB3167-008-P1-K1-E4
aagatctgcctccgcattctcactatcttcaccaaacaaaggaagatgtgatcgcagggaacaatgggtgactacttcctatagactagtccttgcctgctaagacatgcggctactgatacaccaccttgcaccagataccaacatcaccaagtgtgcatatctcgaaataaaaccagtatagcaacgatcgtgatcaacagccggtccattgtagaaacagagaaatatttaaacgcgctctggcatccgtgggatgggaattgataggacgctacccatcgtttgttgaaacgtctcatgctgctgactcgatacatcacatacagcgttgctaatatcaacctagggcgaaggaaacactttttac

SEQ ID NO: 51301 - DNA, 348 bp, Glycine max
  Clone ID: LIB3167-008-P1-K1-E5
cccacgcgtccgacaacgcatacggtggatgaccgacaaaaagaagaaacgttgtggcaaattgcatggttagtgcatcactacgaacagcggacccggacctaacaatgaaccctaccatcccaaagctggaaagggaacacatagtgagtgcgttattcaaaaccgagtatttggcgagcgtgtagcgctgagcagagataggaatgtagtggtggccatggactgtcgcgaaggaagcataattactctgagaggggctatgcgacaatctgctgcgacactgtgacatactctacataccccacatcaagccttacggaggaagtgcattccgagatctactct

SEQ ID NO: 51302 - DNA, 361 bp, Glycine max
  Clone ID: LIB3167-008-P1-K1-E6
ctctgataacacaactcacatagattttgacgcgcgagaacaaaaaaacgccaggggttttttgaatggctgtattatcacaaccctcggctggcaagaccacaaaactgaccccatcagccccagaagtggcaggggtgcgcatgagcaagaccgctaccaagcacgattactgaggaagtccgtgtcccgggccataccgagttaagtactagaccccattctaatgcgagcctacatactacctcaccgcgatagacgctaagcgactactgttggcacactgctgggctatacacatacccagaaaccatatgcaagaaccgtgaactatgagtgaaccactccaggatggccatgc

SEQ ID NO: 51303 - DNA, 368 bp, Glycine max
  Clone ID: LIB3167-008-P1-K1-E7
cggaaacctgagaatcttcatgcatctaatcttgggatggacagaatgaggggaagactgccagttcagcagccttctttcccaatcaagggagaggttgttacaaattttgatttcattcgtaagaggaagatctctggtgactttaacatgataatggatcagaagatttacacatgtgaacaacctcagtgcccttacagtgaaactcgccatggttttgctgacagaaattccagggacaatcatcaattgagttgtccttatagaggtgctgcttcagattatggggcttcaaattttcaggttaacgaggtaaagccggtcatattcccccagtcctttgttcagccaaaacctactactca

SEQ ID NO: 51304 - DNA, 374 bp, Glycine max
  Clone ID: LIB3167-008-P1-K1-E8
tcgcggagtacaccgaattcagcgtttacttcaactccatcgccttccagtgccgtcagaagctccctgccaccaacaacaagttcacctacaattgcgacgcacacaccttcaattacctcgtcgacaatggctacacatattgtgttgttgcagatgaatcaattggaagacagttacccatggcttttctagagcgtgtcaaagatgaatttgtgtcaaaatatggtggtggaaaggctgccacagctcctgcaaacagccttaacaaggaatttgggccaaagttgagggaacatatgcagtactgtgttgatcatcttgaagagataagcaagcttgcaaaggtgaaagctcaggtttctgaagttaag

SEQ ID NO: 51305 - DNA, 339 bp, Glycine max
  Clone ID: LIB3167-008-P1-K1-E9
caaaacaattaactggaataacgtaatttaatcaaataggatacaaaaaacgatcaccaaaaactattttcctccaccagtttccccaagtccccatggatatacacctgacattgacttcctcctatctttgtttcaacgagttgattctatgatccatcaaagtgggcatgaaaattgcctcattacgcaccccataaacacctatgagcaaggaaatcaggatacaccgacctgcttattgtccttatagcatatatcaaacttttttgcgtgtaagcaccttcatctggacacaggcttctgcagcaacgcagtcaagtaaacttctccattctt

SEQ ID NO: 51306 - DNA, 242 bp, Glycine max
  Clone ID: LIB3167-008-P1-K1-F1
cccacgcgtccggtcaataccagttctatatcctaaatgtcctctttgatgccgaggcacagagctatgtcccgttccaagctaaccgctcgcaagtccacctgcggataggcgctcgggaagcaatcgtcgactaaagccgctcgcaagttaactacggccaccggcggagtgaagaaaccccacctattcatgccccgaacgcgtgctctgatggagatcagaacgtgccataagagcac

SEQ ID NO: 51307 - DNA, 370 bp, Glycine max
  Clone ID: LIB3167-008-P1-K1-F10
gtttctgcgttgaggtctttgatggtttctcactctccgccgctggatgccttagtggtgccctctgaagattatcacctgagcgaatatgtgtctgcacgagacaagcgccgcgaattcgtttccggcttcactggaagtgccggcttggcacttataacaaagaaagaagcactgctgtggacggatggacggtattttttgcaggctgagaaagaacttagtgctgggtggaagctaatgcgaattggtgaagatcctgctgtagatatctggatggccgataatttgccaaaagaagcatccgttggggttgatccctggtgcatttcaattgatactgctcaaagatgggagcgtgcttttgccg

SEQ ID NO: 51308 - DNA, 407 bp, Glycine max
  Clone ID: LIB3167-008-P1-K1-F2
gtcggaaatccccggtcggcccaacccgtccgcttacacacacaagcactacaacattttttttggtctctcattttctctatagctggatgggttctggtgctttacaacttcttctgatcttgggtcttctggctagctcatgcttagcacaagccccaggtgctgcacccacacaaccacccactacaaccccatcaccaccaccaccaagatcagcacctgcaccagcacccaccccgccagcaacaccaccaccagcaacaccaccaccagcaacaccaccaccagcagcagcaactcctccaccagcaacatcaccaccagcaacaacaccaacgccaacaccaacagctgcacctacacctgcttcttctcctgcaacctcaccagtcccttccgctagt

SEQ ID NO: 51309 - DNA, 297 bp, Glycine max
  Clone ID: LIB3167-008-P1-K1-F3
gtcaaatccccagattacccattgttgctgaggcagctgataggcaagttctttgaatcaccaatccgttattgagataatttaattgtatagcaaagcaacttcagcctaagtagtggaaaagtttgcattttcacttccttaatagttactatcttggaaagtttctgcaaaacggattttagttgtttcttacattgctggattctagtacgtctttctaaatcaggattaaattattgtaagatgatgagaaacttccctttctccattgttaattgaattcgatgttatatc

SEQ ID NO: 51310 - DNA, 376 bp, Glycine max
  Clone ID: LIB3167-008-P1-K1-F4
cccacgcgtccggcattctcaacactttctccctcactcactcatcaatggcatggacgaatatcagcaatggccatgatcaacgccaaatgcgtcaacccaaagttccccaaccccaccaagctcgtaccatcaaaaccttcccttcaggtcaaccttccaaagggcctaatagcctcacccgaaaacaccaaactttccactgcgacagcaatcgcaggagcaatattcacaaccctcggaacctgcgacgccgctttcgccgttcaacaaatagccgacatagcagaaggcgacaaccgcggtctggcactgttgctgcccataattcctgcaatagggtgggttctgttcaacattctgcagccggcgctga

SEQ ID NO: 51311 - DNA, 278 bp, Glycine max
  unsure at all n locations
  Clone ID: LIB3167-008-P1-K1-F5
gaatnnnngtcngcacgagacaagcgccgcgaattcgtttccggcttcactggaagtgccggctttggcactataacaaagaaagaagcacngctgaggaccgatggacggtttttttgcaggctgagaaagaactttgtgctgggtggaagctaatgctaatcggttaagatcctgctgtagatatttggatggccgataatttgccaaaagaagcatcctttggggttgatctctggtgcatttcaattgatactgttcaaagaagggagcgtgct

SEQ ID NO: 51312 - DNA, 373 bp, Glycine max
  Clone ID: LIB3167-008-P1-K1-F6
gtttgttgttgtaactcgttcttctttttttgttgttctgtgtttgggtttggtgggtctctcacctgaaaatgtcttgctgcggtggtaactgtggttgcggaagctcctgcaagtgcggcaacggctgcggaggctgcaagatgtacccagacttgagctacactgagtcaaccaccaccgagaccttggtcatgggagtggcacctgttaaggctcaatttgagggtgctgaaatgggtgtgcccgctgagaacgatggctgcaaatgtggaccaaactgctcctgcaacccctgcacttgcaagtgaggtgttgggagagcaagcttcaagcagagatagcccttaattaggaataatgataaactatt

SEQ ID NO: 51313 - DNA, 373 bp, Glycine max
  Clone ID: LIB3167-008-P1-K1-F7
gaagaacaagtagttgagaactaataaggagaagcaaatggcttcctcaatgatgtcttccccagctgttaccactgtcaaccgtgccggtgccggcatggttgctccattcactggcctcaagtccatggctggcttccccaccagaaagaccaacaatgacattacctccattgctagcaacggtggaagagtgcaatgcatgcaggtgtggccaccagttggcaagaagaagtttgagactctttcctacctgccagaccttgatgatgcacaattggcaaaggaagtagaataccttcttaggaagggatggattccttgcttggaattcgagttggagcacggtttcgtgtaccgtgagcacaacagg

SEQ ID NO: 51314 - DNA, 358 bp, Glycine max
  Clone ID: LIB3167-008-P1-K1-F8
ctctctctcttccctcgccgcaactataatggcgtccctcacgtgcacccccgaggtccctccagctccgattggccttcgccgcccccaaattcccgcaccccccgcacgtgcgaatgcgcaacttcaagctcaaccgacttcgccctctgcgcgccgcgcaagacggcgtcagctccgagtgggccgggcccgggcccaaacttgatggcttctcgggctggtccgacaccgacgccgagcagcggcccaacaacgccccaaagaaggactcgtatggaggagttgggggagtaggactggctggagtacttctactttcagggcttacttttgctgccttatctcttggcaaaca

SEQ ID NO: 51315 - DNA, 350 bp, Glycine max
  Clone ID: LIB3167-008-P1-K1-F9
gctatacatccgaagcggtacagatatttttttcatcgtttaatgagcggttacacagtatgatttgaaccgagaaacaactattaatatacagcaaaggttctgaagttatcctgtaacaaaagagtacacgcttagaccgaacacagacatatttcttggaaaaaacaaaatgaaaggaaaaaaactttctaatatcatcggtgtgagtgcaaaagccactggaccctaatgagttcggactatggagaacatgcatgaaatctggtgaggcgtgagcgggctgataatgcgacacgagcagcttatgtagcggatccatgcaaagttgcacgtgcatgcgcttcata

SEQ ID NO: 51316 - DNA, 376 bp, Glycine max
  Clone ID: LIB3167-008-P1-K1-G1
cccacgcgtccgctcacgcagagtactgcactgaacgaaccgtagccatggtggagaacaatctcttcgaggatatatttagggtcgaaaaattaaaccccgatgacaaaaaattattcgataaagtcactcgcattgaagcaagaagtgaaaagtttgacatgtttatgcacctggacattaattccgagatatatccgttaaaggttggtcagaagtttgctcttgtgcttgtttcaacacttaatcctgatggaactccagacactggatattatacccagatcagtcgacaatcactggccaacaattttgaatatgtcatgtatgggaagctctacaggataacagagggttcagggcgtgaaaaagcgga

SEQ ID NO: 51317 - DNA, 344 bp, Glycine max
  Clone ID: LIB3167-008-P1-K1-G10
gccacgcgtccgaccacgcgtacggaaatggccagctatgctccactttttgtgaatgccaatgataggaggtggaacccggatgcaattgtattcaactccttacagctgtatggaactcctagctattgggtgcaactatttttctcagagtcaagtggagcaacacttctaagtacatcacttcaagcaccttgctcaaatgcacttgctgcatcagcaattacatttcaaaattctgtagataataaaaattacatacgaataaaagttgtgaacttcggtaccactgccgcgaacctcaaaatctctcttgatgactggaccaaactcattgagtatct

SEQ ID NO: 51318 - DNA, 273 bp, Glycine max
  Clone ID: LIB3167-008-P1-K1-G12
gcgacacttatgcaacctgcttttatttgcgccactctactacttcccaaaccgcgttcacgattgatcgtgtgaaaatgagcaccatttatggccttatgatcttagttcggggttggtttaaatatgcattggctcgatgatgagatcggtctgctcctacggaaatgataccagaagcgctacttattggagagtcgacgctactattgtctgtcctatgcaccattaagatttgcctggcttcacacgcaatgtctataagagtgatca

SEQ ID NO: 51319 - DNA, 372 bp, Glycine max
  Clone ID: LIB3167-008-P1-K1-G2
ctcacgcgtacgctcacgcagagttttgtactgaacaaatcatggctatggtggggcgcaatctattcgtggatatgtcatgggtctaaatattaaaccacgatgacaaaaaattataggataaagtcactcacattgaagcaagaagtgaaaagtttgacatgtttatgcacttggacattaattccgagatatatacgttaaaggtcggtcagaagtctgctgttgtgcttgttttaacacttaatcctgatggaactccagacactggatattatacccagatcagtggacaatcactggccaacaattttgaatatgtcatgtatgggaagctctacaggataacagagggttcatggcgtgaaaaag

SEQ ID NO: 51320 - DNA, 86 bp, Glycine max
  Clone ID: LIB3167-008-P1-K1-G3
atttcatcttatccacgactgtgggtgtcatgacaaaaaccatgggaatggtcaaagagccaaatagattcataaccgaaaacccc

SEQ ID NO: 51321 - DNA, 389 bp, Glycine max
  Clone ID: LIB3167-008-P1-K1-G4
ggcggacccacgcgtccgcccacgcgtccggctggaggaggctttgtacagtcagcatatcctgtgcagccccgggcttctgggtatgctcaaccagagtcaggttctcagagagcaccagcatctggttatggtggtgcagtgcaaccagggtacggtcatcaaatatatggtgctcctcagggtggccagcctggttatggtcaggcatcgccttcttacatcaacattttttttggtgctggttatacacacactctggaatatactggtgatggtgatggtaatgctcaggcaccccatagtgctgttgctaaagcattacccaagagtttatatttttgccacctcttccctccccttctcattagactaatttttattgtctt

SEQ ID NO: 51322 - DNA, 256 bp, Glycine max
  Clone ID: LIB3167-008-P1-K1-G5
gatcaccaaagtacttgtgagtgtatacccaacacaaactaagatcaacatggactactacacccgcgtttcagaagttgagagggaacctatcatggagtattccacaccacgaccaatgatgggcaactaccaccaccctaatgctcaccgtgtcctcaacgagaagattgtttatgaggaggatgtgattggaggatccccgcacaaccacatgcatcaccaccaccctgagactcatgagagagtcaagggg

SEQ ID NO: 51323 - DNA, 373 bp, Glycine max
  Clone ID: LIB3167-008-P1-K1-G6
aaaaaagaaaaccaaaagggcttttttcctcggactttttctctctctcgctatgctttgggctagtggcactgctgcaagtgcacctccaagaggcgcattgccaagccaccatgtttgaacattcaacagaagcctctttactgccacttttctctttggaattggttcttctgcttaccaggcagaaggagcagcaagtgtagatgggagaggaccaagcatatgggacacctacactagacagcatactgaaaagatttgggatcatagcaccggtgacatgggagctgatttttatcatcgatacaagggtgacataaaaatagcgaaagaaattgggctggactctttcagattctctatctcatgg

SEQ ID NO: 51324 - DNA, 370 bp, Glycine max
  Clone ID: LIB3167-008-P1-K1-G7
agaaccttgaagttgagccgaagtagaagttgtatagcaagtatcatgaggaatttatcttcagattggtttgaagatgaagacgtaattcagaacactcctccaatggggaatgaaaaagccttccctggaagaccagagggctttccgaagaacatttatgcactaaattacaatgccaatgcagagaggctttcatgtaatggccatgggaattctgtgcaaaattcttctgttcatgatgttcagaatgtgaaatcctccactaacaaggaaagagagggtaatggtcccttggctccaaaaggaaaggaaacagaaaatcttaacaggttgagtttactggctgaccatgaggggtctgggacag

SEQ ID NO: 51325 - DNA, 371 bp, Glycine max
  Clone ID: LIB3167-008-P1-K1-G8
cgctcttctccgccacttctgaatttattgaatcaacaatcatgtcggacggagagcaccatttcgagtccaaggcctacgccggagcctccaaaacctaccctcagcaagccggtaccatccgcaagaacggctacatcgtcatcaaaggccgcccctgcaaggttgtggaagtttcgacttccaaaactggaaagcacggtcacgctaagtgtcactttgttggaattgatattttcactgccaagaaacttgaggatattgtgccctcttctcacaactgcgatgttcctcatgtgaatcgtactgattaccagctcattgatattgctgaggatggatttttgagtctgcttactgaaaatggcaac

SEQ ID NO: 51326 - DNA, 374 bp, Glycine max
  Clone ID: LIB3167-008-P1-K1-G9
ggtgaagatgacacaatcagtgaagcatctgactctgacctttctcgatttatgccaaagatgccaatatccccttccgcacctcaagttatcagcattggacaacttatggaatcggcattagaggtagctggtcaagtggctggaacagctatctccacctcgccccttccatacaacgccatggctagtcagtgtgaatcactcgggacatgtgcaaggaagaagctttcaaattggctggcctttgagaatcattacagccaagcacctgataaatcgtttctggcaattgctgatattaggaactcagcacttgagaaggtagcaaatggtgttgggcatgcccagctgccaagggacccaatgaagct

SEQ ID NO: 51327 - DNA, 280 bp, Glycine max
  Clone ID: LIB3167-008-P1-K1-H12
gccagtgattagaagccagtttttttgtgcttcatactacaccttcacaaaccgcaagaagaatggaacggggaagaagaagcagctcttttggccctatgtgctcaaccggaccttggtttctccttcttttgttctgactctgaggatctgctgaggcctacaagaattatacagttggagactctttaggatggtttgacaatacttgggagtccaatgtcaattaccagaagtgggctgacagttaagaattcagcttgggagattttcttatttt

SEQ ID NO: 51328 - DNA, 394 bp, Glycine max
  Clone ID: LIB3167-008-P1-K1-H4
gggcggaccaacccgtccgggctttttttacatcacatccatccttttggtccctcctgaacctgtctgcatgcattcccatttcttcttccgtatgcatgttcccaccgtctaaaaaacctagcaaagcaacaaaacggcgtcatgcttgggaagtagcatgcaatggtaaccctagaaataggagggacattctgatcggccttggaggactctatggtgctacaacaagtctcacaagtaacaacactggttctgcatttggtgcttcattgtcgcctccagatccaactaactgcgttcaaccggacccagaaaaagaccctttttgcccaccaccccccttcaaagactacgagctccctccacacgatgacaagacattaccccttcg

SEQ ID NO: 51329 - DNA, 414 bp, Glycine max
  unsure at all n locations
  Clone ID: LIB3167-008-P1-K1-H5
cggaccggaaancccggggcggcccaagcggtcggccaacccgtccgggctattctgttttttttaaagcacccaccaaaaaaacaaaccggagctactacgaccacatcctttagtcatggccacaagttgctcctacatggtttccaccaaattatccatgctaggttggagtggaggaagaagaagagaagccagaagccggagagcattcttggtctcagctcaacaacaaagcgatgttaaggaagcagagagcttgaaggtagaagaggagcaagagcaggaacaaatgcaaactcaaacaccgaagccaaaaggaacaacaccaaggccagtggaacctcagttgaatgtgaagagcaaaaacatgctgagggaatatggagggcagtggctgagctgcgccacacg

SEQ ID NO: 51330 - DNA, 379 bp, Glycine max
  unsure at all n locations
  Clone ID: LIB3167-008-P1-K1-H6
angccgtcgggaaaagcctattctgcctcaaatttttcgacattgccgccgcccccacaggagggaagtttccagcggcggctcccaccacttcctgggtatccccagccacagccccttttaaacctaaaccaaaatcacctgcgccagttgcttctcccacttcatctcctccagcttcatcccccaatgctgcaaccgcaacccctcccgtttcgtctcccacggtagcatctcctccgtctaaagctgctgctccagctccagcaaccactcctccggtggccacacctgccgcggccactcctcctgcggctacacctnctgctgtgacaccagtgagctcgccgccagcgccagttccggtgagttctccacc

SEQ ID NO: 51331 - DNA, 374 bp, Glycine max
  Clone ID: LIB3167-008-P1-K1-H7
cccacgcgtccggaaaaaggtgcacttagtcctgcaacagctatcaactttgccatggatattgtcagaggaatggcctatcttcacaatgaaccaaatgttataattcatcgagacctaaagccaaggaatgttcttttagtcaattctagtgccgaccatttaaaagttggagattttggattgagtaagcttatcacggtccagagttctcatgatgtatacaaaatgactggtgaaactgggagctaccgctacatggctcctgaagttttcaaacatcggagatatgataagaaggttgatgtgtactcctttgcaatgattttgtacgagatgcttgaaggtgaaccaccttttgcaagtcgtgaacc

SEQ ID NO: 51332 - DNA, 374 bp, Glycine max
  Clone ID: LIB3167-008-P1-K1-H8
accagagaaaaatgcttttgaatggtctacatctttgaaagcccctcacacagaggatgcaattcgggttactcagtccacagcaaactttttcataagtgaagctaggaaatccacaaacacacctgatgctcaaaaagtgcgagataatctcatctacaattacaaacctacttttggtggaacggctgggaaaggatatgatcaagtgtatctctttgaataattctatctgtaggaggtgtccttgaatttgattttatgcacaataaattatgaactggggatgtagtttgaagaaataaaaatttgtgcacagtgatgtttgtaagatgcttaatttcagggcaatgctctgcttatcaatgtgttat

SEQ ID NO: 51333 - DNA, 367 bp, Glycine max
  Clone ID: LIB3167-008-P1-K1-H9
gagagagagagaaatgagtgaagaatccaaaaagaacttcgccggagctctaacggcgaggcccaactccgatgagccgaaaccggcaccggtgccagctgttcccccgaagaaggtcatcatcaagagcgctgatatgatccccgacatgcagaaggaggccgttgatatcgccgtcgccgcgtttgagaagtacaatgtggagaaagacgttgcggagcagataaagaaggagttcgataagaggcatggccccacgtggcattgtatcgttggacgtaattttggctcatatgtgactcatgaaacaaaccactttgtttatttctacttggatcagaaagcggttttactctttaaatctggc

SEQ ID NO: 51334 - DNA, 344 bp, Glycine max
  Clone ID: LIB3167-009-P1-K1-A1
ctagaatggaatttcgatgctcagtcatctcttttaccattctcttctctcttgctcttgcaggagagagccatgtccatgcatcgctacctgaggaagattattgggaagctgtttggccaaacactcccattcccactgcactgcgagagcttctaaagcctctccctgcaggtgttgaaatcgatgaactccctaagcaaattgatgatacacagtacccaaaaacattcttctataaagaagaccttcatccaggcaaaacaatgaaagtacaattcaccaagcgtccctatgcacaaccttatggtgtatatacatggttaacggatattaaagacacc

SEQ ID NO: 51335 - DNA, 318 bp, Glycine max
  Clone ID: LIB3167-009-P1-K1-A10
gctaaatccctagtaagccgccatggtgaagtactcaagggagcctgacaatccaaccaagtcttgcaaggctagaggcgccgaccttagggttcattttaagaacactagggaaactgcctttgcaatcaggaagttgcccttggttaaagctaaaaggtacttggaagatgttcttgcgcacaagcaggccattccgttcagacgtttctgtcgtggtgttggaaggacagctcaagcaaagaatagacactttaatggccaaagaaggtggcctgtcaagtcagcaaaattcattcttgatttgcttaaaaatgc

SEQ ID NO: 51336 - DNA, 335 bp, Glycine max
  Clone ID: LIB3167-009-P1-K1-A11
aaaagaagttcccaagaagaggacacaccacaaaatgaagaagggtctcctcattgtgttgctcatcattcagatccactacaatgttgttgtcaacggcaatgagttggaatcagagttctcatttgattcccatgtggccagaatgctctatgatgtgagtctctctgtgtctggcaaaacaggcaatagatacaacaaagctgttagatgtccacaaagcaaaggttaccgtagctgcttgccatccagaaatggacgacgtggccctagacaacgttgtgctgatttcactagggtttgctaaaaacatgtttcagtcttgataattttca

SEQ ID NO: 51337 - DNA, 329 bp, Glycine max
  Clone ID: LIB3167-009-P1-K1-A12
gagtatcaacaaatggcaaccactgtgatgaccactctcccccaattcagtggtcttagaccccaattctcagctgcccctgtgaagaacttggttgctgtgcaacccatgagtcgcaaggggaagggtgcattgggagctcgatgtgactacattggttcatccactaatctgattatggtggcttctacaaccctgatgctgtttgctggaaggtttggattggctccatcagcaaacaggaaagccactgcagggctaaagctggaggtgagggacttaagcttgcagactggtgaccctgctggcttcacccttgctgacacctt

SEQ ID NO: 51338 - DNA, 278 bp, Glycine max
  Clone ID: LIB3167-009-P1-K1-A3
cgcactcacgagcaagggaagcgacttgtgagcgagtatagtctatgcttatactttacaagagtacaatatacaagtaacatttcaacaagacagaatgtcctgcacaaagtagctcgtgtcatggatataatggctgcagcacaagaacaagtcaatttgatagcacatttcgattttaatacatcagggacatctgcaaaggaatgccatactaatcgagtgaagccaattatgctgaaatacctgctcatgctacacaagatgggttagatttt

SEQ ID NO: 51339 - DNA, 94 bp, Glycine max
  Clone ID: LIB3167-009-P1-K1-A5
ctaagtactactacacgggtagaactacttatccactcaggaaggatcaaagagaatggctcatgcaatgggcttaatggctggcatagcgtgg

SEQ ID NO: 51340 - DNA, 231 bp, Glycine max
  Clone ID: LIB3167-009-P1-K1-A6
attgggttctagcagcgtattgcactcattcatgcaggctagtgataggtttaacatgaattctcagctcgagcatcttcaagccaaatatgttggaactggccatgctgatttgaacagatttgagtgggcagtgaacattcaacgtgatagctatgcatcatatattgggcactaccctttactgggattctttgctattgctgaaaatgaatttattgtaagaggacg

SEQ ID NO: 51341 - DNA, 93 bp, Glycine max
  Clone ID: LIB3167-009-P1-K1-A7
aacgcacatacagccacgcgtactagagccgcagaagccgctttcacatgcccgcaactgcactcaggcacagaggaagaatctacaccctgt

SEQ ID NO: 51342 - DNA, 235 bp, Glycine max
  Clone ID: LIB3167-009-P1-K1-A8
gaacatttggtaatcacatgtgaactacttaaagcaaacttgtatgagaggtatacatttaatacagtatcacgtggagaagggtactttacaatgccaagattgcagtcaattaccattcagagtttggaagcctataagtgtttcgttagccatggactaatatactgcgacttgcaaccagagaatattctgggcaaaagctctaccatgtgttaggcgaaggccattgctc

SEQ ID NO: 51343 - DNA, 298 bp, Glycine max
  Clone ID: LIB3167-009-P1-K1-A9
gaaggtcattgcttggtatgacaatgaatggggctactcccaaagggttgtggatttggctgacattgttgccaacaaatggaagtgagagccaaacaaattctcattggtaattaaattattatgtatgtaccatgccattgtaattttgtatgcttactactactactaccactacaacacttgttgcttcatttttcttttaaacttgtactgagaaacagaaccatcaattttctctgccttctcattgtgcaataaaaattcttaccttgaaaaaaaaaaaaaaaaagggcgg

SEQ ID NO: 51344 - DNA, 316 bp, Glycine max
  unsure at all n locations
  Clone ID: LIB3167-009-P1-K1-B1
gcgaaggactttaggttgggatttgggaattagggttgttcgcgtggcgaagatgattgaggtggttttgaacgatcgattggggaagaaggtgcgcgtgaagtgcaacgacgatgataccatcggcgacctgaagaagcttgtggcggctcagactggcacaagagccgacaagatccgcatccagaagtggtacaccatctacaaggatcacatcactctcaaggattacgagatccatgacggcatgggtctcgaactctactacaactaaacacaancaggtgtgttttatgcgtaatatactatgtgctgg

SEQ ID NO: 51345 - DNA, 351 bp, Glycine max
  Clone ID: LIB3167-009-P1-K1-B10
cccacgcgtccgcccacgcgtccgtccacgcgtccgcaaattctctgtgttgtgttgtgtacttgtgttaattgtgttgttgttgtaggaaatttaagtgaagagagaatgatgatgaagtctgctatgtgtgcattggtgcttgtggcactggttgtggttgaagtggggcccatggctgaggctgcggtgacttgcaacccaacacagttgactccttgtcttccggcaattaattcaggttctgcaccttcgagtgcttgttgccagaagcttgaagagcaaaagccatgcttctgtggctacctcaaaaaccctagcttgaagcagtatgttaactcttctaatgcc

SEQ ID NO: 51346 - DNA, 360 bp, Glycine max
  unsure at all n locations
  Clone ID: LIB3167-009-P1-K1-B12
cggacgcgtgggcggacgcgtgggtcaagcttaagcccaacaaagcttaaaaaaagaagataagaaaacccaataattactaactcttgaaaaatgaagatgggtagtcctagcatgggaggctcaaagagaaggctttcaagcagagggcttggaggagcccttagggagcaaagggcaaggctttacataataagaaggtgtgtggtcatgctcctctgctggcatgactagctagtagtactagttgaggccttcaaagttgaaatccaaagcttgcttccatcactatggaacaagatttggntatcttctcttcctttggtttattcttttcttcttccttcctttgattcatat

SEQ ID NO: 51347 - DNA, 144 bp, Glycine max
  Clone ID: LIB3167-009-P1-K1-B2
gccacgcgtccgatttagggataattatcttgaggtgtatctcttgctgtcctggttctatggtgcttcaaaaggtaggctgacgtctctgtctcctgtaccatgcctccgcaagctgacaaagcttttcatcacgacctttat

SEQ ID NO: 51348 - DNA, 297 bp, Glycine max
  unsure at all n locations
  Clone ID: LIB3167-009-P1-K1-B6
cccacgcgtncggaaatcgaaagaagggaggagaagggtgtcaatggcagagtgtttgggtgtttcagtttcaactcttggctcattctctcttagtaggcccacaatcttttatcgatctcccattaatatctctctctttgcctctcaatctcatttccctgctgctgcatttggttatttgacaccttccaacccacacctgtacgccgctgtctcctccgactccaaggccgctacttcgctagacctaacttaacccgatctcgataatagcggcggcggtgcttaccgaaa

SEQ ID NO: 51349 - DNA, 237 bp, Glycine max
  Clone ID: LIB3167-009-P1-K1-B7
gaacagttgttaatcgtatgtgaactacttaaagcaaacttgattgtgttttataaatttaatacagaatcaggtggtgtagtgtactttacgatgccaagattgcagtcaatgaccattcagcgtgtggaagctattaaagtgacgcatagcgcttggactaatacactgcgactggaaaccagagaatatttcgggtaaaagatatagatagtgtgaggtgaaagtcatttatct

SEQ ID NO: 51350 - DNA, 377 bp, Glycine max
  Clone ID: LIB3167-009-P1-K1-B8
gaacatttgttaatagtatgtgaactacttaaagcaaacttgtatgagtttcataaatttaatagagaatcaggtggtgaagtgtactttacaatgccaagattgcagtcaattaccattcagtgtttggaagctcttcagtttttgcatagccttggactaatacactgcgacttgaaaccagagaatattttggttaaaagctatagtaggtgtgaggtgaaggtcattgatcttggaagtagttgttttgaaacagatcacctttgctcttatgttcagtcaaggtcctatcgtgctcctgaggttattttgggactttcatattacaagaagaatgatatctggtctcttggctgcattttggcagaactttg

SEQ ID NO: 51351 - DNA, 296 bp, Glycine max
  Clone ID: LIB3167-009-P1-K1-B9
cccacgcgtccgcccacgcgttcgcccacgcgtccgatttgcagcacccaaacatcaacatggctgccaaactcactctatcttctcccctttccttcaaaacttcatttcttccaaaatcaccatcattttctccaggtttatgctcccccagaactaatgttactggtgtcaaagtccatgctaaattaggtggtggagatgaacaagccaagaacggaggcaagaagaaattcataacaagagaggaagaaccacaacagtattggcagacagcatgagaaagagaaggagag

SEQ ID NO: 51352 - DNA, 316 bp, Glycine max
  Clone ID: LIB3167-009-P1-K1-C10
gaagaaggttcatccaatccccgaagcccttcaccgcattgcaaccatgtcgaggagaaaggtcagagagccaaaggaagaaaacgtgactctgggcccagctgttagagatggtgaacatgtctttggcgtcgctcgcatctttgcctccttcaatgataccttcattcatgtcactgatttgtctgggagggaaacgcttgtccgcatcactggtggaatgaaggttaaggctgacagagatgaatcatctccttatgctgctatgcttgcagctcaagatgttgctgccagatgcaaggaacttggcataact

SEQ ID NO: 51353 - DNA, 362 bp, Glycine max
  Clone ID: LIB3167-009-P1-K1-C11
cccacgcgtccgaaaaacacttagtccttctaaaatctcacttctcacatccaaaatctcgtgccagcaaacatggcatccatgacgactatgcttcagaccatggttcccaagaatgcaccgaatctccctcctcgtgttggtgtttccaacaacactactaagatctcatttgctggctcaggtagggtaccgtgcacccggattcagaggaacaggaatagatcttcttccattgtggttgctgcagttggagatgtttcatctgatggcaccacttaccttgttgctggtgccattgcttgggctctcattggaacagcctttcccatcttcttcttccgcaaagacacatgccctga

SEQ ID NO: 51354 - DNA, 326 bp, Glycine max
  Clone ID: LIB3167-009-P1-K1-C12
agcagcagaaggggcaattgatgctgctaacatactaaagccagctcttgcaagaggtgaactacagtgtattggagccacaacattagacgagtacaggaagcacattgaaaaagatcctgctttggagagacgattccagccagttaaagtgccagagccaactgtagatgaaaccatacaaatactgaaaggacttagagagcggtatgaaattcaccacaagctccgctatactgatgaggctcttgtagctgctgcacagctgtcctaccagtatatcagtgatcgatttttgccagacaaagctatcgatttgattgatg

SEQ ID NO: 51355 - DNA, 210 bp, Glycine max
  Clone ID: LIB3167-009-P1-K1-C2
gacatgactctgagtaagatgtttctatgtgtgactgtatctctgtctgccatggttctctgcgacaccacctgcgaatacaacgtctctgtccactcaaccttagatcatcgagatgtcagaactcaacttcccaagattaagatgccggatgagtggctaccaaaggaggcagcgtatcatataatacacgatgagtagatgtctgat

SEQ ID NO: 51356 - DNA, 312 bp, Glycine max
  Clone ID: LIB3167-009-P1-K1-C4
cccacgcgtacggatgaactggttggcatatcaaaactgagattaggcgagtctattggtgactcgggtccctccaccctgtctcgaaaacttattgaagaaggaccctctagacaatcagcttttcatgcaacaccaacatgtggtgatatgaatggcagtgccatccatgcagtttaagcgtgtgcctcgtgttccgaggaaaggattggtatgtgagcattatggatcaacttggggcctgcatgaatgtggtcttgtgttcatcatacatcatgttgtggggtaaccctaaaaaatttttttttcttt

SEQ ID NO: 51357 - DNA, 326 bp, Glycine max
  Clone ID: LIB3167-009-P1-K1-C5
cccacgcgtccgcccacgcgtccgggcattggcagctaatgctactccctctctggccttcgcttcttcctccttactgaaccacaatccccaatttggtgctgctcccaaacgattcgtttcttcttcttcttcttctttgtgccttgccgcggggctcagctccaaggctagggccttcagtttctctgcctcggctgcggcccttgacggagaagaactcgcggtggaagaaacgtggaagctagcgagaccaaccgaagtgtacgtctgcaacctttcacgaagctgtgacacggagcaactactttatatgttcaaccctt

SEQ ID NO: 51358 - DNA, 309 bp, Glycine max
  Clone ID: LIB3167-009-P1-K1-C6
agaaccttcactcttctgatggatcaatttcctattcgtcttttttttgtcacatctctcctcagttgcccatttctgctcattgctcaatctccaagtccaattatctcccgtatcagtgtggtaggagctgtttattgtgatacctgctccaccagcactttctctaaacagagctacttcttgcaaggtgttgaagttcacatacagtgcagatttagagcaacctcaccaaaaactagcgagcagataagcttctcagtgaatagaaccacagaccaatatggagtgtacaagttggaaatacca

SEQ ID NO: 51359 - DNA, 366 bp, Glycine max
  Clone ID: LIB3167-009-P1-K1-C7
gtgatgatcttgaactttgtgttctggggagtagatgaataggtggatgactatgaagaacctcatgctagaggacacgggaacacaacgctctgataggatgtgacattaggatatatgttttatattaattatatgaagcttatacgaccttgtttgagccgagatgactttattataaatttggacaagtttgaatatgatgtagaagaaagtgaatgtgagtcttttacccctttgaaagacttgtatttaaaaatgttttaaaaatacttttaattaatatttgaaattttatttctttattaatatatatgtgaggggtagagggtgttacactaaggttcttcaactaggtgtgaggtg

SEQ ID NO: 51360 - DNA, 243 bp, Glycine max
  Clone ID: LIB3167-009-P1-K1-C9
cccacgcgtccggtttcatcaaatgtacgcgcaattaagagaaatttgatcaaatgtcaaatagtttattacgtaattgagtttaaattttctgggtgctttagcaagctatgataatttgggcgggaggggctaatgcaacgtcattttgttctgtccatcagcagtcttagaggtcaattattccaacattgttttatgcaatgattatataaggacgttaatgtttgtttagggtctaac

SEQ ID NO: 51361 - DNA, 333 bp, Glycine max
  Clone ID: LIB3167-009-P1-K1-D10
gatcgagataactagaaacagtgtgatgaaaatgaaggtccttgttttcttcgttgctacaattttggtagcatggcaatgccatgcgtacgatatgttccctctccgaatgaacactggctatggtgcccgtactccggaggtgaaatgcgcaagttggaggcttgctgtggaagcacacaacatctttggctttgagaccattcctgaagagtgcgttgaagcaacaaaagaatacatccatggcgaacaatatagatcagactccaaaacagttaaccaacaagcttacttttatgccagagacctcgaagtccattccaaggacacatt

SEQ ID NO: 51362 - DNA, 397 bp, Glycine max
  Clone ID: LIB3167-009-P1-K1-D11
ccgagcaactaccatggctaccgctccttcgcttctacactcatctgggtcctcttttttctctcaatttcgtgcctttcaattctcttcttcttcgctgtttcctcatggaaacaggcatgggaatgccgtggtctctgtgaaggcctctgcttctggggttgtgttggtggagatgtttgatgcttagattgctaattgtgcttaaactgcttactctgtgttaatttttttctttgtttcatttaagtatttttttttttcttatcttaatatccttgttttttttttatttgtagatatttttgtttgttttattttttttttttattgtattgtttttttttgtattttattctctttttttgtttttttttactttctattttaatttttt

SEQ ID NO: 51363 - DNA, 322 bp, Glycine max
  Clone ID: LIB3167-009-P1-K1-D12
gcagaaaaagaaatggaagacgtgataacagaagcagcacccccatcaaggttcctggaagaagacctaaacatcttcacaccctcatccccacctctccccggacaccctgctcgcccccgtgcctttcctcgtaccctcccaccgggcccacgccgacgcccgcgccctactctatatccggcccgactccgtactcgtcctcgactaccttgaccccaccaacttccgcgggaagctcttcttcgacgacaccgtcgcggacaaggctcggacctccaccgcgatgaaaagggctcacgatgagaagctcttgggggag

SEQ ID NO: 51364 - DNA, 313 bp, Glycine max
  unsure at all n locations
  Clone ID: LIB3167-009-P1-K1-D4
cccacgcgtccgcccacgcgtncggaaaaagcaaaactggtttctcgcatttcctccgaaacaaaccgtttcgctcgtttctcggatcagcaatggaagccccacccaaaggcgctgctggaagaagaggtgacaggaagaagtccgtttccaaatccatcaaagctggcctccaattccccgtcagccgcgtcgccaggtacttgaagaaaggccgttactctcgccgccttggcaccggcgctcccatttatctcgccgccgttctcgaatatttcgccgcaaaagtaatgataatttcacgattcgattc

SEQ ID NO: 51365 - DNA, 374 bp, Glycine max
  Clone ID: LIB3167-009-P1-K1-D5
agaaattggtgaaggaaaattgttctccccaggaaatttgagagccacatctgacaaccccgattatgctaagttgatcgattactatgtcaatgaaaagtacacattgagatacacgggaggaatggtgccagatgtcaaccagattattgtaaaagaaaaaggcatcttcaccaatgtgacatcaccatcagccaaagccaagctgagactgttgtttgaggtagctccgttggggttcttgattgaaaaagccggaggttacagcagtgatggtcatcagtctgtgctagacaaagtcatcactaacattgatgagagaactcaagttgcttattgatccaaaaatgagatcattcggtttgaagaaaccc

SEQ ID NO: 51366 - DNA, 298 bp, Glycine max
  Clone ID: LIB3167-009-P1-K1-D6
ctccatttctttccccatcagcgaaaagacagaacaagctccgttgactttttccattttccaattttctcggtgattctatcagcctccgacacaatcgcgcgccaaacgttgaattggtgccaccactcagggagagtctctaacagaccaacatgagtgtggatccaaagagaagtgcctctaatggccaggagaaaatgttaccatcactagaacagcaagcattgatcaatgaggtgagaaggttaattgggccacagtctggtaaggcggccattttttgttctgatgcatg

SEQ ID NO: 51367 - DNA, 365 bp, Glycine max
  Clone ID: LIB3167-009-P1-K1-D7
cccacgcgtccggatcacaaccccatcacacaccaatgttctcgatgtctcttcttctctccaccaagcccaccaaatcctctccttcaacccacaacttctagaagagcaatcttcagaaacagaaactcccacttcaccatcttcttcttcttcttcattctctctccaactccacccaagagaaaccctcctcaacgagcaacaccccaactacaaaaccctagttctcttccgactcgcccgcgacacagcccgagttaactctctcaacaccaaactccagcttgccctcttcagcctcaaccggtcggatctttacccgaccgaaacggaactgctccgacccgaagacctcttgacgc

SEQ ID NO: 51368 - DNA, 358 bp, Glycine max
  Clone ID: LIB3167-009-P1-K1-D9
atttattctgtttgtggtctcactagctagaaacaacatcactacacacaaatggcacaagtgagtttgttgatcgagataactagaaacagtgtgatgaaaatgaaggtccttgttttcttcgttgctacaattttggtagcatggcaatgccatgcgtacgatatgttccctctccgaatgaacaccatgggaaattaaagagtgtgagagtgaatacaagatgaggtttgatatgcctgggatgaacaaggaggatgtgaaagtgtgggtggaggagaagatgcttgtggtcaaggctgagaaggcacaaaagaagaagccagagaatgagattgtggaattacaacaagaaaag

SEQ ID NO: 51369 - DNA, 348 bp, Glycine max
  Clone ID: LIB3167-009-P1-K1-E10
cacaactccactcttagctgccattggtttttcttcttccatttctcttcctttctaagcttttttcgattacccatttggagattctgtcctaatggctcttgctccttccaaagtttcctccttttccgggttttctcccaaacccagtgttggggatgctctgaaaaacccaacttgctctgtttctctgagctttgcgaatgtgaaacttggaagcagaaaccttagggtttgtgcctcaactgtgcctctctcaagggtgattttcgaacccttcgaggaggttaagaagggtgaacttgctgtttcaacggctccccaagtctcgcttgctcgtcagaacta

SEQ ID NO: 51370 - DNA, 402 bp, Glycine max
  Clone ID: LIB3167-009-P1-K1-E11
gataactagaaacagtgtgatgaaaatgaaggtccttgttttcttcgttgctacaattttggtagcatggcaatgccatgcgtacgatatgttccctctccgaatgaacactggctatggtgcccgtactccggaggtgaaatgcgcaagttggaggcttgctgtggaagcacacaacatctttggctttgagaccattcctgaagagtgcgttgaagcaacaaaggaatacatccatggcgaacaatatagatcagactccaaaacagttaaccaacaagcttacttttatgccagagaccttgaagtccattccaaggacacatttgtgttcagtatagatggcaccggactctttaatattccatactacaaaaaacatggatatggggtggagaaatt

SEQ ID NO: 51371 - DNA, 385 bp, Glycine max
  Clone ID: LIB3167-009-P1-K1-E12
cactgtgagagcggcgaagaagaagaagaacaataatgaaggacgccggaaagagccacaaggcgaatgcaaagctgtcgccggagacgcggaaggatcggaaatcggcgacggggctgagtggatcgccgaagaagggaggccacggcgggaagttcacgtggatcggcaacggctacgagaacgtcgagatggagcacggtgctatggacgccaaggacccgaacttcgaggatccagcggagatcgccgccgtgtgatcgcggtggtttccggtgacgagatctgtacatactaataattgctaagagacgcggttttcgaattcaataatatgaagcaagtaggagaagaagcgctttctgggattgattgttatagaact

SEQ ID NO: 51372 - DNA, 348 bp, Glycine max
  Clone ID: LIB3167-009-P1-K1-E4
cccacgcgtccgcccacgcgtccggcattatcacaaacacctcgtccctcacaatgcagctagcaatggcggccaacgctgtcgtttcaccgtcgccgttccgacctcagccctttctccggtcatccttctccggcgtctccgtcaagctcactccccaatccataacgctttcacgctccaagcccctcaccgtcttcgccgccaccaagaaggccgtcgccgtcctcaaggggacctccgccgtcgaaggcgtcgccactctcatccaagaagacgatggcccgacgacagtttctgttcgcatcactggccttacttcggggcttcatggtttttacctacatg

SEQ ID NO: 51373 - DNA, 345 bp, Glycine max
  Clone ID: LIB3167-009-P1-K1-E5
cccacgcgtccgatttcaatctctctctctctctgtctctctctctctagacttagattttgtgaatggctgaagtggaagagggacaggtcatcggcgtccacaccgttgatgagtggaagctgcaactccagaatgcaaaagactccaaaaaactgattgtggtggattttactgcttcctggtgtggtccatgccgttttatggccccagttcttgcagagattgcaaagaaaactcctgaattgatcttcctcaaagtggatgtggatgaagtgaggcctgttgctgaggaatatttcattggggccatgccaacctttctcttcttgaaagatggcgaga

SEQ ID NO: 51374 - DNA, 339 bp, Glycine max
  unsure at all n locations
  Clone ID: LIB3167-009-P1-K1-E6
cccacgcgtccgcccacgcgtncgtccgatttaagaagaaccgcaagaagcgcggccacgtcagcgccggccacggccgtattggaaagcaccgcaagcaccccggcggccggggaaatgccggcggcatgcaccaccacaggatcctcttcgacaagtaccacccggggttcttcgggaaggtagggatgaggtactttcataagctccgcaacaaattctactcccccatcgtcaacatcgacaagctatggtctctgataccccaagacgcgaaagacaaagccctaaaatcgaaagacactgcccctctaatcgacgtcacttagcacgggtact

SEQ ID NO: 51375 - DNA, 375 bp, Glycine max
  Clone ID: LIB3167-009-P1-K1-E7
tgatgatgcatctgctctctccctgtggcaccccaatttgaagttgctccttgtcactcttggcgaacatggctctagatactataccaagaatttccatggatcagtggaggcttttcatgtcagcacggtcgacacaactggcgctggtgattcctttgttggtgctctattaagcaagattgtcgatgatcaatccgtacttgaagatgaagcaaggttaagggaagtactcaagtttgcaaatgcgtgtggagcaattacaactactaaaaaaggagcaatttctgctctttccacaaaagctgatggcctcaacctgatcaaagaggcataaaaaattaatgctaggagcctttggggttccttatatat

SEQ ID NO: 51376 - DNA, 343 bp, Glycine max
  Clone ID: LIB3167-009-P1-K1-E8
caacttcaaccttgctttcttttctgctcaacatggctgaagattatctccaagaagagaagaagcgagttcggaacccttttgtccccattggtgcacttgttactgctggtgtgctaacggctggcttaatcagttttagacaaggtaattctcagttaggccagaagttaatgagggctcgtgtggttgtccaaggtgctacagtggcgctcatggttggcactgccttttattatggagaaaatccttggcgatcgagttaaaatttgaatggcctgaaacaaaagttgaagtttgtaattgcttggttccttggtggttttagttttatttttgggat

SEQ ID NO: 51377 - DNA, 227 bp, Glycine max
  Clone ID: LIB3167-009-P1-K1-E9
cccacgcgtccggaggccttgaacttcaagagacaatgcagtgagggccaagttcagtagtaacaaggccatggcatgttcagctcaatcccaatgtcgtggcaatctctagacctgttcattggaaatgtctttttgcttctctttgtcaacgcaatttattttggatccagtttaaatgaattgccatgggaatttttcttgtattttcacccatcgcaaaattt

SEQ ID NO: 51378 - DNA, 254 bp, Glycine max
  Clone ID: LIB3167-009-P1-K1-F1
cccacgcgtccgttcatgtgctgatatcctcgttctctctgccagagatggcattgtttcgctaggaggtccccatatccctcttaagactggaagaagggatggtagaaggagcagagctgatgtggttgagcagttcctcccagaccacaatgagtccatttctgcagttcttgacaagtttggtgccatgggaattgacacccctggcgtcgttgcactgcttggagcacacagtgttggtcgaacccatt

SEQ ID NO: 51379 - DNA, 394 bp, Glycine max
  Clone ID: LIB3167-009-P1-K1-F10
aaccactaaccaaaccaaacctctcaagtctcaatggcttctcagcaacacgacgccgttttccgcgaagaagacatggacgacgacgacgacgagtctcaggaggacggagactacgaagaagaagacgacgacgttttggccgacgacgaagaaaacgagccctctccctccacggctcttgccgtcaccgtcgccgtccccggttcctccgtctccaacggcggtgccgctccaatttcgacgcccaccgccaccaccatcgtcgtcgcagactccttcgatccgaagcggcggcgcctcgagccagtcgaggagaaaaagccggcggcgacgccggacgactcgcggcggctgtttcaacggcttgggaccgaccaggaccagatcgagc

SEQ ID NO: 51380 - DNA, 412 bp, Glycine max
  Clone ID: LIB3167-009-P1-K1-F11
cccacgcgtccgcccacgcgttcgtccacgcgtccggagcaaagcgcgcattgagatttggctttttgagcagaaggatttgaggattgaaggccgaatcatcggttttgatgaatacatgaatttggttcttgatgatgctgaagaagtgaacgtcaagaagaaaagcagaaagacattagggaggatccttcttaaaggagacaacataaccttgatgatgaacacggggaaatgattaacactctggcacagttgtaaacttcgttcctatccaacaagaaagaaaaattatcttttccttttcagtttaaattactgtttcttttgtttacaactttaaatattgttgtgggtagaaatatttatcatgttatgaatattgttgaaatttttaattcttttttataaa

SEQ ID NO: 51381 - DNA, 195 bp, Glycine max
  Clone ID: LIB3167-009-P1-K1-F12
cttacgtgttcgaagaggccagatgacagggttatgaggctcgttttgttagctacacagtgcagatgcattctgtttgctaatttgcacgaggaccatatattgctaccgagatagctcgatgacgataactcagagagtggcactgctgccgagagcaacgttgcactgcatggcagtgatcggaatcatgac

SEQ ID NO: 51382 - DNA, 168 bp, Glycine max
  Clone ID: LIB3167-009-P1-K1-F3
cgtactttattttttgctctgatttaaacgagtaacactatttacagtgagattaattgacaaaaagataccaacagtgtgcacgcactcgcatacacacttattgtgactgacggcttgtgttgcacgcataacaaccaaacacgataaacaagtacgaggagatga

SEQ ID NO: 51383 - DNA, 404 bp, Glycine max
  Clone ID: LIB3167-009-P1-K1-F5
ggagattcccgtgctgtgttgggtaggagagttggcaacaccggtgggatggccgcgattcagttgtctacggagcacaatgcgaattttgaggctgtcaggcaggagcttaaggaattgcacccgaatgacccccagattgttgtcctcaaacatggagtgtggagagtaaagggcattattcagatggtttatgggagcacctgagtaatgatcaagcagtggatattgttcacagcagtccatgcgcgggtagtgcgaagaaacttgtcaaggctgccctacaagaagcagcaagaaaacgtgaaatgcgatattcagacctttacaagattgacaagaaggttcgtcgccattttcacgacgatataactggtattggtttattcttaaaccacaacctt

SEQ ID NO: 51384 - DNA, 141 bp, Glycine max
  Clone ID: LIB3167-009-P1-K1-F6
tgcgatctgaattatatgatttagcttgtctgaatcgttgattttactacatacccgggtccgctatctctcatccatcatgaaaggaggaaagtccaagaccgaatctaagagagccgatgccaaacttgctgtgaatag

SEQ ID NO: 51385 - DNA, 347 bp, Glycine max
  Clone ID: LIB3167-009-P1-K1-F7
aacacagagagcgcagtcgtagaagaaaagaaatcctcacaatgcattcattcggctacagagccaatgcgttgctaacctttgccgtcaccattttggctcttatgtgcgccatggcctctgtatccgacaacttcaacacccccactccctctgcacaagtccaggtgttgaacatcaactggtttcagaaacagcccaatggcaatgacgaggtcagcatgacactgaatatatctgcagatttgcagtcccttttcacatggaacacaaaacaggtttttgtttttctagctgctgagtatgaaactcctaagaattccttgaatcagatatccctgtgggat

SEQ ID NO: 51386 - DNA, 380 bp, Glycine max
  Clone ID: LIB3167-009-P1-K1-F8
cccacgcgtccgacaaggacagtctgataagggggaagcgagcaatactctcgaatgtcacagataagcattctgctacacataaccaacactgccttctcgtttgagcattatataaactcagtcggtgctcataacttttcctcacacgactctgctcactcatatttatattgaacaaacagagatcccaaatcaatggatattgaagcaggtaaagatattcctgtaagagacccagcgctactcgatgacgacggcagaatcaaaagaaccgggaacgtgttcactgctaccacgcacatagtaacggtggtggtgggtgcaggagtgcttgctttggcatgggccatggctcaacttggatggattgctggcat

SEQ ID NO: 51387 - DNA, 293 bp, Glycine max
  Clone ID: LIB3167-009-P1-K1-F9
gcggcgacagtcactctccgacaacaacacttccgcggcgaaaaatgtctctggtggcgaacgaggatttccagcacattctgcgtgtgctgaacaccaacgtggatgggaagcagaagataatgttcgctatgacctccatcaagggtattggaaggagattcgccaacatcgcttgcaagaaggccgatgttgacatgaacaaaagggctggtgagttgagtgctgcagagttggatagtgtgatgactggggtggcgaaccctaggcaattcaagatcccggattggttt

SEQ ID NO: 51388 - DNA, 250 bp, Glycine max
  Clone ID: LIB3167-009-P1-K1-G10
gccacacgtacggccacgcgtacacttcattatgaagcattagatcctttagaatgaatcggatgtaaccttggccactgcctattctggcacggccgttatactagcacgcacatatcgtggatccagcactcacgggcctataatctgactgcaccatggctatcctcagcactcaacgaagctaccaagcgcaaccattatgcttttcggggctactcatacaactccgttatgtaaaaccagctta

SEQ ID NO: 51389 - DNA, 205 bp, Glycine max
  Clone ID: LIB3167-009-P1-K1-G11
gcgtaaggaaagcgaattcaaattttcgtctcgtaccatgcttattgaagaacatacgcacccatcaacaggtgcctgtgttgaaacatagcaaaggaagaggggttggactcaatcaaagccaactattttaaggtaccttatcatgaactctatttgactatagctggaaccagacttatcactcaactgtatttcaagagaa

SEQ ID NO: 51390 - DNA, 383 bp, Glycine max
  unsure at all n locations
  Clone ID: LIB3167-009-P1-K1-G12
cccacgcgtccgcgtaaatttctctctcaacctcctcaaaggaaaaaagaaaaggcatatagttatatggataacaaatcaccgagcaaggagtccaaggaggtgacacgagagtcgcttattgctatttctaactctttacctgataagactctggaatcaacttctgccttagagagcaagaaatcagacggggttatgataccaaaccgtgatcaagatgacaagtttaggtctgaactgatttcaatttcttatgctgaatcccctgatgacaaaatctgatctgttcacgtgtaactcctggattattatcngttggttgaacttatgtcaatttcttatatgttgtcttagctatcggacaactgtgtaaatacttt

SEQ ID NO: 51391 - DNA, 398 bp, Glycine max
  Clone ID: LIB3167-009-P1-K1-G3
ccacgcgtccggtagtttatcgtgaggagaattgaagttgtttgttttctttgttgctgcagtagttttggtagcatggccatgccatggcgcaggctaccaaaggttccctctccgaatgaaaactggctatggtgagcgttcttcggaggtaaaatgcgcaagttttaggcttgctgtggaagcacacaacatccgagcctttaaaaccattcctgaagagtgcgttgaaccaacaaaggactacattaatggcgaacaatttagatcagactctaaaacagttaaccaacaagctttcttttatgctagtgaacgcgaagtccatcacaacgacatatttatattcggcataaattacaccggactctctaatattccatactatgaaaaacatg

SEQ ID NO: 51392 - DNA, 385 bp, Glycine max
  Clone ID: LIB3167-009-P1-K1-G4
tatctgctgagcattaaaagttccccaaccatgaaggcaatccttgttttcattttactcttggcctctatttttttccttcccagttcaactcttgctcgacaactggaggtggtgacaggcggtacccagaaccctaataatcccgcttttaaatgtagccgcggcggcagttataggccttgcgccccatcgaactcgccaccaagaccaccatgtaatgggtacattaggtcttgccacatcggatcgcccccaagaccaccatgtaatcagtattagtgggaaggttgcttaccatgaaactaccgccaacagtactataatgatatatgtagtttttaattcttggtactagctggcatctttttaacactctttctgt

SEQ ID NO: 51393 - DNA, 279 bp, Glycine max
  unsure at all n locations
  Clone ID: LIB3167-009-P1-K1-G5
cccacgcgtccggaacaacatgaattttctaaccttcgttactgttctactcttcatactaccagcaacctcatcttcccagtatttggggaacaaccttctcactcatcgcaagatattcctaaaaaaagacaacattattacctcgtacgctgtcatctntgacggtggtagcacaggaacccgcgtgcatgtcttccattttgaccagaatttggatctccttcccattggtgatagtcttgagcttaataaaaagatcacaccccgtttaaagtg

SEQ ID NO: 51394 - DNA, 385 bp, Glycine max
  Clone ID: LIB3167-009-P1-K1-G7
gattgcctccctctgctgccgtccctaatctgaaggctcccgccatctgcgatcggatttcatggctccaaagaaggacaaggctcccccaccttcatccaagcctgccaagtctggcggtggcaagcagaagaagaagaagtggagcaagggtaagcaaaaggaaaaggtgaataacatggtgctcttcgatcagggtacctatgacaagctcctctctgaggcacccaaatacaagctcattactccttccattctctctgaccgtttgaggattaatggatcacttgcaaggaaggctattagggaattgatggctagaggttcaatcaagaatgtgtctgcccatgccagtcaacaaatttacactagagctaccaacacc

SEQ ID NO: 51395 - DNA, 396 bp, Glycine max
  Clone ID: LIB3167-009-P1-K1-G8
gctgtttatgctgcattggataatgcaggaggagggtcattgaacatagttgtgtctgagagtggatggccttcttctggtggaactgcaacttcacttgataatgcaagaacttacaacacaaacttggttcggaatgtgaagcaaggaacccctaaaaggcctggtgcaccccttgaaacttatgtgtttgccatgtttgatgaaaatcagaagcagccagagtttgaaaaattttgggggctcttttcttctattactaagcagcccataaactcgattaatttcaattaatttttagctgaagcataatttggtggtgaataagggccaccagttcaaatgaaacttcaataattgttttagaagaagccgggataggacttttaatttatt

SEQ ID NO: 51396 - DNA, 260 bp, Glycine max
  Clone ID: LIB3167-009-P1-K1-G9
gccacgcgtccggccacgcgtacagttagttgtgcgccattagatactttagagtgaaccggatgttactctggccttgcatatgttgcgacggacattatgataccacgcccatagcgtgacacaagctaccaaaggcctagaatgtgactgcaaaatggctatgctcagctctcaacaaatatacaaagcgcatctcttatgcttgtcgggggcactcacaatattccgtcttttaaaaccactttttggcagtgcgt

SEQ ID NO: 51397 - DNA, 355 bp, Glycine max
  Clone ID: LIB3167-009-P1-K1-H10
gtaatttagggtttggtttgaaacatttaggctaggcggggcgtggcggagctgaatcggaggcatgaagctcaccgtgaagactctgaaaggcagccatttcgaaatcagggttcagccctcagacactattatggcagtcaagaagaatatcgaagatgtacaaggcaaagacaattacccatgtggacagcaattgctcattcacaatggtaaggttttgaaagatgaaactactttatccgacaataaggtctctgaggatggttttcttggtgtcatgcttagtaagggtaaaaccttgggatctgctggcatttcatcaactcagtttgcttgcaaccccacctacaac

SEQ ID NO: 51398 - DNA, 382 bp, Glycine max
  Clone ID: LIB3167-009-P1-K1-H11
aattcaggaaaaaaaaaaaaaaaattcatggtggtgaaggtgtatggtccaacctatggatcccccaagagggtcctggtgtgtctgattgagaaggaaattgagtttgaaacagtgcatgttgatctctttaagggagagaataaggaacctgagttccttaagctgcagccatttggatcccttcctgttattcaagacggtgattatactctctatgaatctcgtgcactaatcacatacttagctgagaagtataatgaccaagggactgacttattgggaaagacaatataagaaaagggtctagtggaacaatggcttgaagtggaagcttataacttttacccaccactctacaacttggttattaatggtctgt

SEQ ID NO: 51399 - DNA, 373 bp, Glycine max
  Clone ID: LIB3167-009-P1-K1-H3
gactgatgcggaggattcctacgaaacacacagaaacagctctgtcagcgcttctgagccttatgcctgacaactactacgatcttctctctcaagtcgatcagcccctgcaggttctgtgcgatgtgcaatgctgcaaggagttcattttgtgcgaatacaatagagatgccgactcttacagatcaccctggtccaataaataccatccaccattagaagatgggtccctcccttcttcagagttgcggaagcttgaaattgaagcaaatgacatatttgcaatatatcgcgaccagtattatgaaagtggcatttcatcagattacatgtgggaagatgaataagaagggttcgtaaccagccttttaat

SEQ ID NO: 51400 - DNA, 273 bp, Glycine max
  Clone ID: LIB3167-009-P1-K1-H5
gatcatttcataatcagactcacctaactccgccatggctgctgttccctctactttcgctctaaccaaatctgcattgtccataaacaagctggaccactctctggtcaagatcaaaccatacagcttctctctgaatctaaaccgtctagggaggatggaaacatctttaaccagaaggcctctaacaattcaagccacatatagtgatggtggaaggcccagcagtgctagatgatttgatggtgggcctttttgggaggattaatagtt

SEQ ID NO: 51401 - DNA, 83 bp, Glycine max
  Clone ID: LIB3167-009-P1-K1-H6
cccacgcgttcggcagctgcttctcctatggcaagccaactcaagtccaccttcactagaaactcttgtagctcccaagggcc

SEQ ID NO: 51402 - DNA, 280 bp, Glycine max
  Clone ID: LIB3167-009-P1-K1-H7
cggacgcgtgggcggacgcgtgggcggacgcgtgggcggacgcgtgggttgctcaaaaaccagaaatataaaaccctcagtttcccccacatagtttaccccctccgtttcccctcgtcagaataccgtcccacaaaaaaaaaaaatgaaacatgacacagacaacaacggaaccctcggcgggtccgaagattccctcctccgttcatgtctctctttttttcacgcgccgcagcttcaccggtttgccgtgagtccgtaaacccaaattttaaggatc

SEQ ID NO: 51403 - DNA, 300 bp, Glycine max
  Clone ID: LIB3167-010-P1-K1-B5
agccttccgccaacccttccggaaggggaagctttaccaaaggcaggaggacctggtctaaccggaattggcctcttcggggttggcttttgtggccttcaaccctgccctttcactgtgggaggtctcagtagggcctccctcctctaagggacctcctttcattcaaaggtggggcccggtgtggccaggagatcaagactgacaggcctattggattaatggtggcatggctttgaagggagggagtggtgcctctggccaaaaaaaaaaaaaaaagggccggccgtcttaaaggtc

SEQ ID NO: 51404 - DNA, 189 bp, Glycine max
  Clone ID: LIB3167-010-P1-K1-D6
gctttgacagaaactcaggttctgaaatttaggggtttagaattatgtaagcaacccaagataagcaaaaggaagaaaaatggttgctttgttttgtctctgttcgttgtaaaatgctttctttagtaaatgggaagttcctttgtttctaaaaaaaaaaaaccatattatcataagaggcaaaaacag

SEQ ID NO: 51405 - DNA, 382 bp, Glycine max
  Clone ID: LIB3167-010-P1-K1-E6
ctcaaggccagcatagagaaggggattgcttttgctcagaagcaaactgttgctgcttaaatttccttgtcagcaggtggtttcttgggttatggatttatttgagcataaatactacttagaggacttaggttgcagatttgttgtagcatctttactgcttccagaacttaggattcagactttctatgtatcaattctacttccagttttgttagtagaacgggaggacgcttccatttctgttctctaaaccgagcttaggttttggtcagaaatcttcaaagatgtaagcattataatgtagaattgaaaaaaaatgtaaacgttgctttttgaataatatggccattagaccaaaaaaaaaaaaaaagggcggccg

SEQ ID NO: 51406 - DNA, 371 bp, Glycine max
  Clone ID: LIB3167-010-P1-K1-E7
atcgagagcggccaaccctttttttttgttccccttgcaaacttaatacattcattggatttattcatgtgtcagttactttttgagaagtgtggaatatatacatgtgatggttggtggtgatgaagttttaggtcctaagacagtgcagtgtttattggcatgtgacattgtcaaagactcatggtatgtaaatattcatcataagctagcataagctggactctttttagttgcctgtcacaggcattagtactatcttcggaggactatccacatgatcagggatgaaggatgtatgatgaactctttaccatgtacgactaaagaacaagtggagtatttgtctgtgccaagctagaagatgaaaa

SEQ ID NO: 51407 - DNA, 104 bp, Glycine max
  Clone ID: LIB3167-010-P1-K1-F9
aaaaaaaaaaaaaaaaaaaaaaaaattaaaaaaaaaaaaaaaaaaaaaaaaaaaaaaaaaaaaaaaaaaaaaaaaaaaaaaaaaaaaaaaaaaaaaaaaaaaaa

SEQ ID NO: 51408 - DNA, 202 bp, Glycine max
  unsure at all n locations
  Clone ID: LIB3167-010-P1-K1-G5
taatttcccggtccaccccacccttccgttttcctgaacaaaaatttatatttaaagacttggagtttagtnaaaaaaaaaagaggaaaaaaaaaaaaaaaaaaaaaaaaaaaaaaaaaaaaaaaaaaaaaaaaaaaaaaaaataaaaaaaaaaaaaaaaaaaaaaaaaaaataaaaaatatgggccgccccttctatagtt

SEQ ID NO: 51409 - DNA, 231 bp, Glycine max
  Clone ID: LIB3167-011-P1-K1-A1
tgcagacgtttgggcccaaccttactatcgagacggattcatgcgacctgcgcaccatacgccatgtcatgtgcaagtatgttcaccgcccaagtcatggacttgccgtattgcacgagtcgcgacggcatgtaagatgatcgctgccaggggtgtttcgggtactaccaataccattatcaacttgctgatgaacagcaccttacacaggactcatgtgacgctctatga

SEQ ID NO: 51410 - DNA, 355 bp, Glycine max
  Clone ID: LIB3167-011-P1-K1-A10
cccacgcgtccgctcgcaagcaaaaagaaagaatcccaggcgaggagaaagatggaggggaaggagcaggatgtgtcgttgggagcgaacaagttccccgagagacagccaattgggacggcggcgcagagccaagacgacggcaaggactaccaggagccggcgccggcgccgctggttgacccgacggagtttacgtcatggtcgttttacagagcagggatagcagagtttgtggccacttttctgtttctctacatcactgtcttaaccgttatgggagtcgccggggctaagtctaagtgtagtaccgttgggattcaaggaatcgcttgggccttcggtggcatgatct

SEQ ID NO: 51411 - DNA, 329 bp, Glycine max
  Clone ID: LIB3167-011-P1-K1-A11
cttaaatgtcccttccgatcatccctaatcctcgagatttctttcgattgaactgatttctctcttcttcgccacgcactcttgtctctgtaagcggtgattttggttctggacaatgcctcgtgtatatgttgggaatttagaccctcgagtcagtgagagggacctcgaagatgaatttcgtatatatggtgttcttaggagtgtctggggtgctcgaagaccaccgtgatatgcatttattgagtttgatgataggagggatgcacttgatgcaattcacgccttggatggaaaaaatggttggcgtgtagagctttctcataatt

SEQ ID NO: 51412 - DNA, 407 bp, Glycine max
  Clone ID: LIB3167-011-P1-K1-A2
taccggaactcggaagggtccggcgccagagcgtcccgttcgctacaattttggtagcatggcaatgccatgcgtacgatatgttccctctgcgaatgaacactggctatggtgcccgtactccggaggtgaaatgcgcaagttggaggcttgctgtggaagcacacaacatctttggctttgagaccattcctgaagagtgcgttgaagcaacaaaggaatacatccatggcgaacaatatagatcagactccaaaacagttaaccaacaagcttacttttatgccagagacctcgaagtccatcccaaggacacatttgtgttcagtatagatggcaccgtactctctaatattccatactacaaaaaacatggatatggggtggagaaatttaactcgaccttg

SEQ ID NO: 51413 - DNA, 336 bp, Glycine max
  Clone ID: LIB3167-011-P1-K1-A3
cccacgcgtgcgtacgaatcacactttctatagtgcgagtcatggaccaatggaacgcaacggcgcactatctgtagcattcatatgccttgtatgcgactgcgtgggacgacagtctgctgccgcatgggcgagaagcacttaggctactcactccgacggcactgctgcccaagcaccttccacagtaccgaaatcaccagcttgggtagctgatggaagataatctgcaccaggtgcgaccgatgcatctactatagcgggatgttcgatcaccacccccgtcatggctggttctgtgtctaatctaactgcagcatgttgtggtcttgcgac

SEQ ID NO: 51414 - DNA, 250 bp, Glycine max
  Clone ID: LIB3167-011-P1-K1-A4
tccacgcgttcgatcgcaagcatatttaaagaatcccaggcgaggagaaagatgggggggttggagcacgatgtgtcttatttagctaacatattcccttagagacagacaattttggacggcggttcatagccaagactacggcaaggactaccagtagccggctcctgctctcttagttgatcctaccgagattacgttatggtctttttacttagcattgattgcattttttgtggtcacttttatg

SEQ ID NO: 51415 - DNA, 367 bp, Glycine max
  Clone ID: LIB3167-011-P1-K1-A5
tcccactcgtcctctcgcaagctttatttaagaatcccaggcgaggagaaagatggggggtaaggagcaggatgtgtcctttttagcgaacaagttccccgagagacagccaattggtacggcggctcatagccaagacgactgcaaggactaccaggagccggcgccggctcctctggttgacccgactgagtttacgtcatggacgttttacagagcatggatagcactgtttgtgttcacttttctgtttctttacatcactgtcttaacctttatggaattcgcgggtgctatgtataaaattattaccattggtaattcaatgaatttcttgttccttcgtttgctttactttttccttttt

SEQ ID NO: 51416 - DNA, 363 bp, Glycine max
  Clone ID: LIB3167-011-P1-K1-A6
cccacgcgtccgctcaattccaccaggatcaagtctatgtcctccaatcctaggccaaacaaagcctctggaatggtgccattgaaaccattacctctgagctggaccacagataactttgtgcaggaactcaatgatgatggaatagttccaacaagcttgttatttgaaatgctcaggtgagtcagtgatctcagttcccctattgactgtgggatgcttccagtgaactgattgtttgagagctctaggtactccagattggtcatgttaccaatccattgagggaattcactgttgaaatgattgtttgatgccttgaaatagctcaaagaacttagcatccctagtgactcaggtagt

SEQ ID NO: 51417 - DNA, 334 bp, Glycine max
  Clone ID: LIB3167-011-P1-K1-A7
accggaaccggaagtgttccgggtcagaccctacgcgtccgttcacgcgtttcgctcactcattctcttatgcatcgggcgaaacaaacacatatgagttgctaataatgggaactgatgtatctatatacacagatgcaaatggaagtttcatagataaaaattccttatttgtatttgagttaggaggactactaagtgaggcgggtgcccaatgatgcaaaaattgctcaaaatatttagtttactgatataagagctggtgatctcatgcgagcagaaatcaaatatggttgtgagaatggtacaatgattcagaatatgattaaagaag

SEQ ID NO: 51418 - DNA, 201 bp, Glycine max
  Clone ID: LIB3167-011-P1-K1-A9
cccacgcgttcggatagcctttaattatgaataatgataaactcttaaggggtggctaaaaactcatgtcttacgtctgtgatgtctcacgagcactcaggcctgctgaggctaacaacacaccttagacataaactgctcatgtctggccgttcagcaggaccaagttaccaggactaatgatgggcgagagaagctcat

SEQ ID NO: 51419 - DNA, 364 bp, Glycine max
  Clone ID: LIB3167-011-P1-K1-B10
ctttgatcgcgatcttataggagcagcaatgtactttggtctcatgggtgatggtcagcctattggacgctacgacgacatgtgggcaggctggtgctgcaaggtaatctgtgatcacttgggattgggaatcaagactggtctgccctatatctatcacagcaaggccagcaacccatttgtgaacttgaggaaagagtacaaaggcatattctggcaagaagacattatcccgttcttccagagcattgttcttcctaaagaagctaccactgttcagaagtgctacattgagcttgccaagcaagtcaaggaaaagctttccaaggtagatccttactttgacaagttggcagatgccatg

SEQ ID NO: 51420 - DNA, 370 bp, Glycine max
  Clone ID: LIB3167-011-P1-K1-B11
gctcgacaaagagcactggctgaggccagagaaagacttgaaaaggcatgtgctgaggccagggacaaaacatatgctgataaggcagctgcagaagccagattgaaagcagagcgaactgctgtagaaagagcaactgctgaggctcgagagcgtgcaatggaaaaagtaaaggttgatagagctgcattcgagtccagagaacgattagagagatctgtctctgacaaatttagtgtttctttcagaaatggtggaacacagggctcttcatcctcagatatgctggatccacgttgtcagaactctacctccttcactcattccagatatccatattcctcagtttatggtgcttcctctttttctg

SEQ ID NO: 51421 - DNA, 362 bp, Glycine max
  Clone ID: LIB3167-011-P1-K1-B2
cccacgcgtccgacttgatccaacatttgttttgttagatgagcacacggaattgtttggcagcaccaatataatcagtgcagagattcaaccaattgaacaggaagaaatacaaaaatgtatcagatcttactgtccacaattgctggggaactttgttgactgtttgagaaaaaataatcatccattacctgtctcatgaaaagaagatgattccaagatttggcatgtcacttatatgggaccactttttttccgctccagtgatcctgaaagaaaatttggtcgtgttttgctccaacacatatgagaaccacctagttcaggtcctgcaggtggatcacctacacacagtttagcgc

SEQ ID NO: 51422 - DNA, 371 bp, Glycine max
  Clone ID: LIB3167-011-P1-K1-B3
cccacgcgtccgccggctcgcattttcagaaaaaccctgagcttgaagatggccgaagttgctcaaaacccttctcagcagcagaaagtcataataactaacaagtatggcaataaactagtgggcattttgcatgaatctggaaccaaagagattgttatcctatgccatggtcttcgatccactaaggaagacgatatcataaaaaatcttgctgctgctctagaaaaggcaggagtcagttcttttcgctttgacttcactggaaatggggaaagtgaaggttcatttgagtttggtcactattggagggaggttgatgatctgcatgatgtggttcaacactttcatggggcaaaccataaagttat

SEQ ID NO: 51423 - DNA, 191 bp, Glycine max
  Clone ID: LIB3167-011-P1-K1-B4
gctataccaagcactaatcacaaattcttttcttgctctctactacccattaccgggcttcttttatatggccctaccaaaaacaactactctttaacaatcttgcccaaaaacccccaaaaagtcatattcaaccaagcttccacgtaagtatcaactatcaactgtttcagataatcaatcctgatcac

SEQ ID NO: 51424 - DNA, 343 bp, Glycine max
  Clone ID: LIB3167-011-P1-K1-B5
atcagtttttctaaatccatttcactaattatttctgcccttgtctcaccaaaggcaggaaccaacacttctacctctctccttctgactctctcactctcacccaggaagtcagatgtcatatgcgccaccaagccctcctcatgagaatcttggccatcatagcccgcacggatcttcatccagctcgagttatcacgaccaaaaccttacgatttccaacatctgccgcattatgaagaatgctatgtctcccaacctcaagattgctaacgattccaaagacaccgtgcatgaattctgtactcatttcatctacttcattaccaacgaagccatttat

SEQ ID NO: 51425 - DNA, 370 bp, Glycine max
  Clone ID: LIB3167-011-P1-K1-B6
cccacgcgtccgaagggtttgtaagagaaagaaaaaagaggcgcaagatgagtggtagggtttctgggaaggtgaagtggttcaacgatcagaaggggtttggattcataacccctgacgatggcagcgaggaactcttcgttcaccaatctcagatcaaatctgacggtttccgaagcctagctgaaggagagtccgttgagttcgctattgaatctgaatctgacggacgcgccaaggctgttgatgtcactggccccgacggcgccagcgtccagggaaccagacgcggcggtgatggtggccgaagctattgcgggggacgaggaggtggtggaggtggatatggcggcggaggaagctgctacag

SEQ ID NO: 51426 - DNA, 204 bp, Glycine max
  Clone ID: LIB3167-011-P1-K1-B7
acaaaatgtgggatgctcagctatgatcaccatttctgagcggacatggtagtgggatgacgcttttgatagagcacagatagactgtgactcagaccaagtggtccccaacaagttttgtgactaaaatcaaagcgatgaagacaatgctggggaagagtggaatgctcaacaaaggacatgacagtagcagtggacgtagtg

SEQ ID NO: 51427 - DNA, 69 bp, Glycine max
  Clone ID: LIB3167-011-P1-K1-B8
gagacgtgtccgagtatgagtaatgtttagccgttccatgttcattcgagggggggtttatgactttta

SEQ ID NO: 51428 - DNA, 362 bp, Glycine max
  Clone ID: LIB3167-011-P1-K1-B9
tttgagtatatctgttatagtttatttactactgaaagatggattcgaagaggaagatagcattacttatcttcggtctgctggccatgctccttttcatctcctcagaggtggcagccagagaactgaaagaggtcactggtgctggcttgtctggtggccgtggcgtaaactttggtggtgttggtggcgttggtggcatcccaggaggatttccgtaaaggctgttgagatggggatgatgtagtgagtgaagttgcttgattaaggtgctgatgccctagctatcagaggatacatagttgagacgacagtgtaattctacgtacttaaaataacatatttcatgaataaaatctctt

SEQ ID NO: 51429 - DNA, 89 bp, Glycine max
  Clone ID: LIB3167-011-P1-K1-C1
gtcacgcgtacaattctcactctcttttatgattactaaaccgcttcccccttttgggggataacattacttatgctgggcctcatctc

SEQ ID NO: 51430 - DNA, 367 bp, Glycine max
  Clone ID: LIB3167-011-P1-K1-C10
gaagaccagttttcaaacaagcccgttatagtcaataagcccactaaagtcaagaggaccgttacagctgctacaaatgtaaaatcatattctatagctgacctgcaaattgctactggatccttcagtgtggagcaactttttggtgaggggtcttttggacgtgtataccgtgctcaatttgatgagggaaaggatgttgccgtgaagaagatagattcatctgtccttcccaatgatctgtctgatgattgtggacaactagtttcacacatattccaattgcatcatcccaatgagaccgaacttgtacgttattgttcagagcatggacaacacctactagtctatgagtttcataaaatgg

SEQ ID NO: 51431 - DNA, 305 bp, Glycine max
  Clone ID: LIB3167-011-P1-K1-C11
cccacgcgtacgttctgcagctaaactatatttaggcttaggcaggaatgggcggtcgcagagatacagtccaaatattgctaccagaaccatttggctttaaggtctgggaaacaataatggatcacagcttgagtatttgaagtgtctacatgtggagtcatgcacatgtgatccatgctacacaaagagagctgcatctgatagcataacaatatgcttactagtggatgcatccactacacatatatcctcttaattcagaagtatccaatgtatactctcaagcagagcatacatataaa

SEQ ID NO: 51432 - DNA, 369 bp, Glycine max
  Clone ID: LIB3167-011-P1-K1-C2
atcttactaggtacaggtttaaacttacgatatcactaatcatatgttggactacgggtgaagcacataaatgaacaggatggctgaattgttttttcagggaggaaggccactgtgtaggttgtgaagcctcttgctgacatggttcatgaatcactgatgtatactctacacttgagttgggttaaggataatacctcgtcatgacacacctgcgcttatagttaacgttaaacattttgtgcgcgtcgtgtaaaatttacctaataggacgaaaataaaattgatgatagcgcatttttttttcaaagaactgctttgtgaaataaggaagctggtcttgatcgtctgtctgagatatacttaaat

SEQ ID NO: 51433 - DNA, 329 bp, Glycine max
  Clone ID: LIB3167-011-P1-K1-C3
gccacgcgtgcgctcacacgtcagttttttttttgactatttccctagatacaagagcatatcacttgtgacggatgtaatcaaaatatcattgtatcagataaataatgccaaagtggtgtgtcgaagctgagcttgagcaagagaaagaggtggaagaagcaaaggctggcatggaagaagctgaggagtaccttgactcaatgggggggagggccatggatgaccaaagacactatgcagaggagctagagaggatgtctaatattgagaagcaaagattagttcacactgctgcgtgtgccaaaaaaatggctggtaaaaccgta

SEQ ID NO: 51434 - DNA, 116 bp, Glycine max
  Clone ID: LIB3167-011-P1-K1-C5
gccaatcatacaactatattttcttttttttttttcaaacactatctttcacaggaaggattaaataatccttaccaaaatctcaacaaaaacttcttgtctcttaaatatttaaa

SEQ ID NO: 51435 - DNA, 297 bp, Glycine max
  Clone ID: LIB3167-011-P1-K1-C6
gaatgaagcatgcatcatcccggtctgtgatttttaagaacaaaatccaacattgctttaattctcaattatgtattgatgtattagcaaaatgtctcccttccctgttcgatactgttttttttctatcactagaattgtcttcggggcctaatctacacaattgacccttgataatgctgcatgctgagttctgatagagaatgaactagtaatacgtgttaattgtattttttttatttgtcgatatattttgcgttgcgaaaactaatgcttgcaatttgcagataagggtac

SEQ ID NO: 51436 - DNA, 368 bp, Glycine max
  Clone ID: LIB3167-011-P1-K1-C7
cccacgcgtccgcctctccctcctttgttccacggtcgctttcaactgtttcacgctgaactctcttgttcgttttcacaccattttgcttccactgtgcctccaaaagtctcatctttcttctttataccgaactgggtagagttcatcagtgacaatggaaactgggtcgaactcagaatcattgaacagaaacgtggcgatgagtgtgaggggtagcactgggaagaagaaacagcagggaggtgttactctagcaggcaaaaaagtggacccttttgtgccgagaagcgagcacaacccgagagagttacggtcgtgggcgaaaagaacgggttttgtgtcagattactctggggaagcagggt

SEQ ID NO: 51437 - DNA, 368 bp, Glycine max
  Clone ID: LIB3167-011-P1-K1-C8
cttaactgtagaaaagaaaaaccgaagatgagcttgttgaatgaggagagaaaaccgcacgctgtggttactccatatccagctcaaggacatgtgaaccctttgttaaaactagcgaagctgcttcatctcagaggctttcacataacctttgttcacactgagtacaactacaagcgtttgctcaagtcaaggggtcctaatgcccttgatggcctaccagattttagatttgagagcatcccagatggtcttcctccattggatgatgataatgttactcagcacgttccctctctctgtgactctatcagaaaaaacttcctcaaacccttttgcaaacttgttcatagacttaaccactcttt

SEQ ID NO: 51438 - DNA, 350 bp, Glycine max
  Clone ID: LIB3167-011-P1-K1-D1
cccacgcgtccgctcatcttcctctttttttcaacaaaaaggggttcaattctagctgggtctattacgtcgtgcgcgaccatgaacatggcgatcgcgcttctgttcatggttttcgcagtttcatcagctttagacatgtcaataatatcacacgacaacgctcatgcggatagggccacgaggcgcaccgacgaggaggtgatgtcaatgttcgaggagtggctggtgaaacacgacaaggtgtacaacgcgctcggtgagaaggagaagaggtttcaaatcttcaagcacaatctgcgcattatcgatgaacgaaactctttgaaccgaacctacaagttgggact

SEQ ID NO: 51439 - DNA, 370 bp, Glycine max
  Clone ID: LIB3167-011-P1-K1-D10
ggaatcttgagaaatggcaggggacagcaagagcaagattctgttcatcggagggactggttacatcggaaaattcatcgtggaagccagcgccaaagctggccacccaactttccttttggtgagggagtccactctctccaaccccgcaaaatcacccctcatcgacaatttcaaaggcctcggtgtcaatcttgttttaggagatctatacgatcaccaaagtttggtgagtgctataaagcaggtcgatgtggtaatttctactgtaggacacctgcagctagctgatcaagataagatcatttctgcaattaaagaagcaggaaatgttaagaagttctatccatctgagtttggaaatgatgtg

SEQ ID NO: 51440 - DNA, 369 bp, Glycine max
  Clone ID: LIB3167-011-P1-K1-D11
caaattggccttcacactgacatactcgcttccacttacaccaatctcttccttgtcctcctcttctgcttctcgactccaccttcttcaattcaatggccgccacatatgccttcgccctcggctatttctgttttctcccatggccacagccgatcaagacaaggttgaggaagatgctgccgttgttgatagtaaaatcctacaatattgtagcatagacaaaaaagagaagaaatcagttggtgaaatggagcaagaatttctacaggcactgcaagcattctattatgaggggaaggctattatgtcaaatgaggaatttgataatcttaaggaagaactcatgtgggaagggagcaccgttgt

SEQ ID NO: 51441 - DNA, 367 bp, Glycine max
  Clone ID: LIB3167-011-P1-K1-D3
ctacaaaccatgatctattaactaccttctctgattgttctctgcatttcggcggacctcttgaggcaagcatggttttgttgaaaacagaggagaagatgaagcttccaggatttgaagaggtaatccctgggctatgttttggatctcgaaacagtttggatgatgctgcaagacttgtgaagaaggggattctcaagcctcatgacttcagattctttgttggttatgctggatggcaactggatcagttgagagatgagattgagtcagattattggtatgtagctgcatgtagctcaagtttgctttgtggggctttatcagattcttcagaaagtttgtgggaggagattttgcagctaat

SEQ ID NO: 51442 - DNA, 368 bp, Glycine max
  Clone ID: LIB3167-011-P1-K1-D4
ctctatgttcacagttacttgcactttggtaaagaagcatctcatgcggagatgttgaaggtcactggagattcagctaaccctcgcattctaacctgttataatgcgacctacacatattggggagtttaatataaagcctaggcctgcacttatgggtccagtttcgattaatgtctagaggtagctcttaaagctctgacagtgaatgaaccatgccctcatcaaaattgcacttttggcggaatatgtaactggggaggggggagtggacaacaagtcctctatgttactacatcgatatattatctgatcatacaggcaggtgtagcccatgcaagtaaaacccgttccaaagcttatactgc

SEQ ID NO: 51443 - DNA, 366 bp, Glycine max
  Clone ID: LIB3167-011-P1-K1-D5
ctggctttttccatctgagtgttgaacagataagaagggagaagccaatcatgggttggacttcactaccatctgtcattcagatgtcatctactacacactccagcttcagtgaaaaactcatcacccctcaaaagaagtttcaaattgggacacccacaacaactgcaagagacacacacacaacaatttctaggtcttttccttctcctttatgcaaagctcttcacaaatcagctcctttggctgcttcactttcaattcttctctggtcaacccctgcacatgctgggttcatgtcaggaatttctggaatagaggctattcctggtccttagctacctcagattgactttctcaaacagc

SEQ ID NO: 51444 - DNA, 373 bp, Glycine max
  Clone ID: LIB3167-011-P1-K1-D6
ctaaaagcagtggctgcgtgtgcagtgttatgctcaaactcttccactagcgctataaggaagatgagtagtttctcgccagcgtttcccaagttcatatccgtagaaggcgcagacatacattccagaactaaacctgacggcttcagattcagtcttgtttcgtataacattttggctcaggcttatgtgaagagctcactgttcccacactctccttccccaagtctcaaatggaagcttcgttcagacactattttggcagttctcaagaacttgggagctgattttttctgcctacaggaagttgatgaatttgacagcttttacaaagggaacatgcaggacctaggatattcttctatttatatga

SEQ ID NO: 51445 - DNA, 366 bp, Glycine max
  Clone ID: LIB3167-011-P1-K1-D7
cccacgcgtccggctggtctcatcgatctcaacaacgccaccgaggacgatgaaacgccgtcgtctggctcctcctcctcctcctcctcctccaccgtctgccttgaactctggcacgcttgcgcgggtccaatgatttcattgcccaagaaagggagcgttgtcgtgtacttccctcagggacacttggagcaacacctccacgattttccgctccctgcctctgccaacatcccttcccatgtcttctgtcgcgtcctcgatgtcaagcttcatgctgaggaagggagtgatgaagtttattgccaggtggtgctggttcccgaaagtgagcaagtgcagcagaagttgcgggagggggaattt

SEQ ID NO: 51446 - DNA, 363 bp, Glycine max
  Clone ID: LIB3167-011-P1-K1-D8
cccacgcgtccgcccacgcgttcgcccacgcgtccgattctatttgcatctcataacagagagctgagaaaggaagaaaaaagcgtgtgtcagagatacttaacaatggttgtagaagatacccaaaagtctgtcatcacggaggaccaataccctagcagggtcgtcagcgacaacaacaacgacgacgacgacgatgatctcgaagagggtgagatccccgtcgacggcgaagatagcggcgccaccgccacaacgaagcctccggccgccctcgcccgcaacccccaccctctggagaattcctggaccttctggttcgacaacccttcctccaagtccaaacaagccgcatggggcagc

SEQ ID NO: 51447 - DNA, 363 bp, Glycine max
  Clone ID: LIB3167-011-P1-K1-D9
gaaaaccagtcgtcaaacaagcccgttataggcaataagcccactaaaggcaagaagaccgtaacagctcctacaaatgtaaaatcatattctatagctgacctgcagattgctactggatccttcagtgtggagcaacttattggtgaggggtcttttggacgtgtataccgtgctcaatttgatgagggaaaggttcttgccgtgaagaagatagattcatgtgtccttcccaatgatatgtctgatgattttgtagaactagtttcaaacatatcccaattgcatcatcccaatgtgaccgagcttgtaggttattgttcatagcatggacaacacctactagtctatgagtttcataaa

SEQ ID NO: 51448 - DNA, 163 bp, Glycine max
  Clone ID: LIB3167-011-P1-K1-E1
gccacacattcgacgacactttcgcttttagactagctacgacccaagcttacgctttaaatcctacttcataccaagcggatactttcccatcttgcatttcctcctcaccttcttcttatacccctcacactctcttcttcctcgtccacccggtcggtct

SEQ ID NO: 51449 - DNA, 371 bp, Glycine max
  Clone ID: LIB3167-011-P1-K1-E10
cccacgcgtccgatcaagtcaagttcaagagaagaagagagggaaaaaccgattaccgtgccaggattcggttgattaatcaggacaagaacaaatataacactccgaaataccgatttgtggttcgctttagcaacaaggacattgttgcacaaataatatctgctagcattgccgacttacaaattatgcagcagcttattgcactggtctcctgttggcccgaagagtcctcaaaacacttgaaatggatgaggagtatgaaggaaatgttgaggctactggagaggattattcagtggaacctgccgagagcaggaggccattccgtgcactccttgatgttggtcttgttaggactacaacaggaa

SEQ ID NO: 51450 - DNA, 368 bp, Glycine max
  Clone ID: LIB3167-011-P1-K1-E11
ttatgcttctgatgggctagagatatgggatgccatcaagtcctgggtgcaagaatatgtgtcattctactacaagtcagatgcagcaattcaacaagaccccgaactccaagcttggtggaaagaacttgtccaagtgggtcatggtgatttgaaagataagccatggtggcaaaagatgcaaacttgtgaagagttgattgaagcctcggccaccctcatatggatcgcttcagcccttcatgcagctgttaactttggacagtatccatatggaggtttaatcttgaacaggccaaccattagcaggagattcatgcctgagaaagggtctgctgagtatgctgctttggctaaaaaccctgaga

SEQ ID NO: 51451 - DNA, 367 bp, Glycine max
  Clone ID: LIB3167-011-P1-K1-E2
gttaagttatttcaaggaataccaaggcaagctggccaaggtagctggcagcaaaaaagcagcctcaattatcaaggatgcactgtatgtgctcagtgctggaagcagtgactttgtgcaaaattattatgtcaatccttggatcaacaaagtatactctcctgatcagtattcatcctacttagttggtgaattctcaagttttgttaaggacttgtatggattgggagccaggagacttggagtgacttcactcccaccattgggttgcctacctgctgcaaggactatatttggtttccatgagaatggttgtgtctcaagaatcaacactgatgctcaaggatttaacaagaagctcaactca

SEQ ID NO: 51452 - DNA, 363 bp, Glycine max
  Clone ID: LIB3167-011-P1-K1-E3
gataactagaaacagtgtgatgaaaatgaaggtccttgttttcttcattgctacaattgtggtagcatggcaatgccatgcgtacaatatgttccctctccgaatgaacactggctatggtgcccgtactccggaggtgaaatgcgcaagttggaggcttgctgtggaagcacacaacatctttggctttgagaccattcctgaagagtgcgttgaagcaacaaaggaatacatccatggcgaacaatatatatcagactccaaaacagttaaccaacaagcttacttttatgccagagacctcgaagtccatcccaaggacacatttgtgttcagtatagatggcaccgaactctctaatat

SEQ ID NO: 51453 - DNA, 367 bp, Glycine max
  Clone ID: LIB3167-011-P1-K1-E4
cccacgcgtccgcccacgcgtccgaagagaagcattagcaaaagcaagaagaactagtctaagcagaaatggcctcttcagtgatggcatctgtggccctcaaacctgcccctttcactgttgagaagtcctcagttagaggccttccctccctctcaaggaactcctcttcattcagagttgtggccagtggtggcaagaagatcaagactgacaagccttatggaattaatggtggcatggctttgagggaaggagttgatgcatctggcaggaaaggaaagggaaagggcgtttaccagtttgtagacaaatacggtgctaatgtcgatggttacagtcctatctacgacaccaaggactggtc

SEQ ID NO: 51454 - DNA, 171 bp, Glycine max
  Clone ID: LIB3167-011-P1-K1-E5
cccacacatgcggttaaacgctcatttgtttatgcaaaaagattgctcaatgaggagggtgccttctgtaacgagtggcaaacccaccagagcacccactgaatcatccatttattattctcactaccatagaatcattttcacatgacttagaacctaacatgcacttcc

SEQ ID NO: 51455 - DNA, 218 bp, Glycine max
  unsure at all n locations
  Clone ID: LIB3167-011-P1-K1-E6
cttggaattcaagcttgaatgaaatgtttttttttcacataagtcatctctgaaacgaggtagacaactaccgcagggaactctacatgncttaacaagtaatacatcccgatgcattgatacgctgtgactaattctttgatgtagaccacaacgccttcatcatcttcttcatcgaaacccaatactacacgaacatcactcgcgccaacgtgctc

SEQ ID NO: 51456 - DNA, 290 bp, Glycine max
  Clone ID: LIB3167-011-P1-K1-E7
ctaggaatcgaagcttgaatgatattattatgatccacatatgccatgccgggagccatgtagacaactagtgctggcaactctactgcctggaacatggcatacagcccgatggattgatgccatgtgactaattctttcgtgtagaccacaactccttcaacacctgctacagcgaatcccgttcctgcaaacacatcacttgcgccatattgctcaagctcgagcccaccgtccttgacgaaatcacggagtggcacttaccggcatctgttacatcgcaaccatac

SEQ ID NO: 51457 - DNA, 359 bp, Glycine max
  Clone ID: LIB3167-011-P1-K1-E8
gaagaacaagtagttgagaactaataaggagaagcaaatggcttcctcaatgagctcttccccagctgttaccactgtcaaccgtgccggtgccggcatggttgctccattcactggcctcaagtccatggctggcttccccaccaggaagaccaacaatgacattacctccattgctagcaacggtggaagagtgcaatgcatgcaggtgtggccaccagttggcaagaagaagtttgagactctttcctacctgccagaccttgatgatgcacaattggcaaaggaagtagaataccttcttaggaagggatggattccttgcttggaattcgagttggagcacggtttcgtgtacc

SEQ ID NO: 51458 - DNA, 367 bp, Glycine max
  Clone ID: LIB3167-011-P1-K1-E9
aaagagtgcttgttttatttgccaccttgtcgagcatgggaacagtgttgcggagatacttcactcttactctcagcaagcaaaatgcagatgaatatgggggtgactggcagcagtgactgatgccactgatttatattggacaaatgagataatgggtcgagtaaattataaatccgaggattggagcaaaactcacgaacaagaagttgtggacaaatttgcagaactacctgtcagactcaattacctattcgggagctacataaggcaaatacaatgacacaccgcactatgatagagaggaaggactatattgctgtcatctgaatggaagccagcatgttcgcaacagataaaaaagatc

SEQ ID NO: 51459 - DNA, 362 bp, Glycine max
  Clone ID: LIB3167-011-P1-K1-F1
gtgactatgcggccaatggggtgccctccttctgcctctttcaaggttgaagccaagaagggagagtggttacctggcttggcctacccaacttacctcaatggcactctttctggtgacaatggatttgaccctctggggctagctgaggacccagagaacttgaggtggtacgttcaagccgagcttgtgaatggacgttgggccatgttgggtgttgcatgaatgttgcttcctgaggttttcaccaagtttggaatcatcaatgcccctcaatggtatgatgctgggaaatcagagtactttgcatattcctcaaccctattcgtgatcgagttcatcttgctccactacgtcgagat

SEQ ID NO: 51460 - DNA, 366 bp, Glycine max
  Clone ID: LIB3167-011-P1-K1-F10
cggacgcgtgggcggacgcgtgggaacaagtagttgagaactaagaaggagaagcaaatgccttcctcaatgatctcttccccagctgttaccactgtcaaccgtgccggtgccggcatggttgctccattcactggcctcaagtccatggctggcttccccaccagaaagaccaacaatgacattacctccattgctagcaacggtggaagagtgcaatgcatgcaggtgtggccaccagttggcaagaagaagtttgagactctttcctacctgccagaccttgatgatgcacaattggcaaaggaagtagaataccttcttaggaagggatggattccttgcttggaattcgagttggagcac

SEQ ID NO: 51461 - DNA, 370 bp, Glycine max
  Clone ID: LIB3167-011-P1-K1-F11
cccacgcgtccgcttgattatattgtgtcttcctcgatccatggctagttgtatggtttatgcgtgttacatttatattgttctgggaatattagtgttgaaaggtgcagaggcacagcgtgcgttctttgtgtttggggattctcttgtggataatgggaacaacaactttttggcaactacagctcgagcagatgctcctccttatggcattgatttcccaaccggaagacccactggccgtttctctaatggctacaacattcctgacttcatcagtcaatcacttggggccgaatccacattgccttatttagatcccgagctcgacggggaaagattgcttgttggtgccaactttgcttctgct

SEQ ID NO: 51462 - DNA, 365 bp, Glycine max
  Clone ID: LIB3167-011-P1-K1-F2
cccacgcgtccggtctgcagaaacatattttctaggcttaggcggcaaacgccagttgcagtgagccatcaccaacatcgctatcaaaaacatctctcggtttagtgtattggaacaatgctagataaagcctgacttctgaagtttgtgacgtgtggagacagcacagcagatctgctcttctggagtgaaccactatctgacataaaaagcatgagatggtgacatgaagacttgcctttatgcgaacgctctagagagaaatttccaatgattgctctaatacatgcggacattatgtcctagatgcctaatcgagcattatacttgctatggtggaacggaacacaccctgatctagaatg

SEQ ID NO: 51463 - DNA, 372 bp, Glycine max
  Clone ID: LIB3167-011-P1-K1-F4
gaaaaaaaaaacccttagccaacacaaccatcatggccacctctgctattcagcaatcagcattcactggtcaaactgctctgaagcagctcaatgagttcgtccgcaagaccggtggcgccggcaaaggtcgcactaacatgcgccgcaccgtcaagagtgctcctcagagcatttggtatggccctgaccgtcccaagtacttgggtccattctcggagcagattccatcatacctgaccggagaattccctggtgactacggatgggacactgctggattatcagctgacccggaaaccttcgccaggaaccgggagctggaggtgattcacagcagatgggcaatgcttggtgcccttggctgcacct

SEQ ID NO: 51464 - DNA, 274 bp, Glycine max
  Clone ID: LIB3167-011-P1-K1-F6
aataaccctaccagttgaagatatctactattttaccctggctgctgcacatggcgcggcacgttgcttccgtgcccacctttgtcacttttaccgtcacaccggcccatctgaacgactccttgatttacggagagcatcaatgaatcccatgaacacaacaacctctaaactggaatggccagacaagtcgcattaatggccaccaacatatccctctcagatgctcgatgctatcgcgggaatggactctctgtaccttgacggacgtatc

SEQ ID NO: 51465 - DNA, 366 bp, Glycine max
  Clone ID: LIB3167-011-P1-K1-F7
cccacgcgtccgcccacgcgttcgtccacgcgtccggctagtttatcgtgaggagaatatgaagttgtttgttttctttgttgctgcagtagttttggtagcatggccatgccatggcgcaggctaccaaaggttccctctccgaatgaaaactggctatggtgagcgttcttcggaggtaaaatgcgcaagttttaggcttgctgtggaagcacacaacatccgagcctttaaaaccattcctgaagagtgcgttgaaccaacaaaggactacattaatggcgaacaatttagatcagactctaaaacagttaaccaacaagctttcttttatgctagtgaacgcgaagtccatcacaacgacat

SEQ ID NO: 51466 - DNA, 249 bp, Glycine max
  Clone ID: LIB3167-011-P1-K1-F8
cccaaacgtacaactagcatgtcattttatgatcccagtactcatcatagaggggactaattacattgtacaaataatcgcagaagacaacaccatatctctccatcaaacttacattactgggtaataacaaacatattgtaaacatgcaaaattaccatgcattgccaacacaaaatgacacatacttaaagtataatgatcaaaattatacatccaccaaagtcaaattcaagctctataacaaat

SEQ ID NO: 51467 - DNA, 367 bp, Glycine max
  Clone ID: LIB3167-011-P1-K1-F9
gaggtaccaaaatagtgtgattcatggctgcaacgaatgcgtcaatctttgcatcttccacgcaaccatgcttgcctgtgcctcctaccattccaaacacgcttgctactccttttctcaatgtttcgtcaccaagaagttaccttgtgaagaaaaagcatgtgaaatttagcaaaaaaatcagtgctgctgctgttgcaacaacaacaacaactgaggaaattcaagagtacaagcttccatcatgggctaagtttgaaattgggagggctgctgtctattggaaaaccatgaatggcctccctcctacttcaggagaaaagctaaaacttttctataatccagctgcaactcaacttgtccctaa

SEQ ID NO: 51468 - DNA, 248 bp, Glycine max
  Clone ID: LIB3167-011-P1-K1-G1
cccacacgtccgataaatgaaagaattaatgattgcctttgctaagcattctccgatgtccttaaccatggagagtattacattcacagctcttatgtgatgtggaataagaaaacctaggacgcgagtagagatacatgctagacgttagcatagcacacacaactgcgagtgaaaatactcctcatcagtatatgctccacacacatgtttttcacaagatgtatgaaacataccaatatctctta

SEQ ID NO: 51469 - DNA, 373 bp, Glycine max
  unsure at all n locations
  Clone ID: LIB3167-011-P1-K1-G11
gtgcgtcgaagtttgctaggttcgtgagcaggttcgggaagagttaccaaagcgaggaagagatgaaggagaggtacgagatattctcgcagaatctcaggttcatccgctcccacaacaagaagcgtttgccctatactctctctgttaatcattttgctgattggacttgggaggaggtcaaaagacacagactaggagctgtccaaaattgctctgccactcttaacggcaaccacaagctcaccgatgctgttcttcctccaacgaaagactggagaaaagaaggtatagtgagttcagttaaagatcaaggcagctgcggatcatgctggacattcagcacaactggggctntagaagcagcctatgc

SEQ ID NO: 51470 - DNA, 367 bp, Glycine max
  Clone ID: LIB3167-011-P1-K1-G2
gctcgacaaagagcactggctgaggccagagaaagacttgaaaaggcatgtgctgaggccagggacaaaacatatgctgataaggcagctgcagaagccagattgaaagcagagcgaactgctgtagaaagagcaactgctgaggctcgagagcgtgcaatggaaaaagtaaaggttgatagagctgcattcgagtccagagaacgattagagagatctgtctctgacaaatttagtgtttctttcagaaatggtggaacacagggctcttcatcctcagatatgctggatccacgttgtcagaactctaccttcttcactcattccagatatccatattcctcaggttatggggcttcctcttttt

SEQ ID NO: 51471 - DNA, 361 bp, Glycine max
  Clone ID: LIB3167-011-P1-K1-G3
cccacgcgtccgaccacgcgtacttccattatcgtaaggtgataaggctgggggacggtcacacgcagtgaatttagaactgtcaagggctctctttctctttctatgatgcttattcactactctcgcttcaatcgaaaaaaatcatgggcagaaaattcttcgtcggtggcaactggaaatgcaatgggaccactgatgaggtgaagaagattgctactactttaaatgaagctaaagtccctggataagatgttgtagaagttgcagagagccctccttttgtgttccttccttttgtaaaaagtttgctgcgccctgaattccatgtctcggaccaaaattgatgggttcgcaaagg

SEQ ID NO: 51472 - DNA, 375 bp, Glycine max
  Clone ID: LIB3167-011-P1-K1-G4
gaagactagttttcaaacaagcccgttattgttaataaacccactaaagtcaagaagaccgttacacgctatctacaaatgtaaaatcatatcctatagctgacctgcaaattgctactggatccttaagtgtggagcaacttcttggtgaggggtcttttggacgtgtataccacgctcaatttgatgagggaaaggttcttgccgcgaaaaaaatagattcatctgtgcttcccaatgatatgtctgatgagtttgtagaactagtttcaaacatattccaattgcatcatcccgatgtgaccgagcttgtacgttattgttcagagcatggacaacacctactagtctatgagtttcataaaaatggatcac

SEQ ID NO: 51473 - DNA, 182 bp, Glycine max
  Clone ID: LIB3167-011-P1-K1-G5
gacacgtgtacgggttatagcaacgtatactgcctccaacttgaatcgagagagactgtctgatttttacacatgatgggcacatacaacctccagtaaagtctcctaagacatgaaaaataatgatattcacagaaatgagatgaacggggtgatgctctgcatgacactcaactacactt

SEQ ID NO: 51474 - DNA, 346 bp, Glycine max
  Clone ID: LIB3167-011-P1-K1-G7
cccacgcgtccgaagggtttgtatgataaagaaaaaagaggcgcatgatgagttggagggtttctgggaaggtgaagtggttcaaccatcagaaggggtttggattcataacccctgacgatggcagcgaggaactcttcgttcaccaatctcagatcaaatctgacggtttccgaagcctagctgaaggacagtccgttgagttcgctattgaatctgaatctgacggacgcgccaaggctgttgatgtcactggccccgacagcgccagcgtccatggtaccagacactgcggtcctggtggccgaatctattgcggaggactacgaggtggcggttgttgata

SEQ ID NO: 51475 - DNA, 314 bp, Glycine max
  Clone ID: LIB3167-011-P1-K1-G8
cccacgcgtccgatttttggctgttttattcactactaacacaggctatgaaaggggtttgttctaaattgataccacagggttaacatatatggccatgcgcccatatgaacactattttgctgcccccaacgctgagcaaggagcatgagtgaatcaaccatatacatcaacagctgagacactgcgaccaaaactacatagaacgccacatacacagcttacttcaaaacgacctgcatgcacatcttgtttagaaaatttcgtgaattactataatgtggagaggggacttaataaacggaacaaggatt

SEQ ID NO: 51476 - DNA, 367 bp, Glycine max
  Clone ID: LIB3167-011-P1-K1-G9
ggagaatgttaaagaatgggaagaagctaggtgtccagtgtgcatggaacaccctcacaatgcagttctcctcatatgttcatcccatgagaagggatgccgcccttacatgtgcaacactagttatcgccactcaaattgtcttgatcagttctgcaagtcatttgcagacacctcatcaaccattcctcaagtagaaagtcaaatttcagacacggttgaaagtagaattgatgtgccagaagacagaaatgaggggactgtccgaagtagaattgatgtgccggaagacagaaatgaggggactgtccaaagtagaattgatgtgccggaagacagaagtgaggatttggttacaatgcaaacc

SEQ ID NO: 51477 - DNA, 121 bp, Glycine max
  Clone ID: LIB3167-011-P1-K1-H1
atttcaggtgcttgacatattgccgcatcattcagcatgcgatatcaaggaggtttgcacacctaaaccgcttggcatgtttaccgcacaggtactgttggaattaaagggtattacaact

SEQ ID NO: 51478 - DNA, 256 bp, Glycine max
  Clone ID: LIB3167-011-P1-K1-H10
cccacgcgtacgcccgaattttactttataaaaaacgattcattgatcggtggaacgtaacggcattttctctctcacattcatcaagctctcattcgacagccgttgaggacagattccctgaacatagccatcaagtacttcctcaaatcactccgacggctttcccattctatcaccttcgacagtacctaaattactatcatcaattgttgtttccaaattaaatataccagctgtgatgtctttattcttc

SEQ ID NO: 51479 - DNA, 364 bp, Glycine max
  Clone ID: LIB3167-011-P1-K1-H11
cgttgctacaattttggtagcatggcaatgccatgcgtacgatatgttccctctccgaatgaacactggctatggtgcccgtactccggaggtgaaatgcgcaagttggaggcttgctgtggaagcacacaacatctttggctttgagaccattcctgaagagtgcgttgaagcaacaaaggaatacatccatggcgaacaatatagatcagactccaaaacagttaaccaacaagcttacttttatgccagagacctcgaagtccatcccaaggacacatttgtgttcagtatagatggcaccgtactctctaatattccatactacaaaaaacatggatatggggtggagaaatttaactcg

SEQ ID NO: 51480 - DNA, 93 bp, Glycine max
  Clone ID: LIB3167-011-P1-K1-H2
gcaaaacgtccgtgctgttctaacattatttctaggcgttgtcagtacaggaccctttacttgattcataacacaaaaggctgcaagaagcat

SEQ ID NO: 51481 - DNA, 353 bp, Glycine max
  Clone ID: LIB3167-011-P1-K1-H4
cccacgcgtccggtcgcaagcaaattgaatgaatcccacgcgaggataaagatgggggggaaggagcaggatgtgttgtttggagcgaacaaattccccgagagacatccaattgggacggcggctcacagccaatactacggcaaggactaccatgagccggcgccggcgccgatggttgacccgaccgagtttacgtcatggtcgttttacagagcaaggatagcatatgttgtggccacttttctgtttctctacattactgtcttaaccgttatgggagtagtcggtgctaagtctatgtgtagtaccgttgggattcaaagaatcgcttggggctttggtggcatgat

SEQ ID NO: 51482 - DNA, 338 bp, Glycine max
  Clone ID: LIB3167-011-P1-K1-H5
cccacgcgtccggatagcccttaattaggattaatgataaactattaatgtgtagctaaaaacttatgtattatgtctgtgatggttttcgtgcactctggtgttttgtgttaaacaaacatccttagaataaagtggtcatgtcttgcctttcagcaagaccaagtgttctggacttgtgatgggtgtgttaagctcatggttgcttatgtttttttttaataatggtggagaatcggacgatgctgtataaagttcggctaatctgaattatgaatctttgcttataatattaaatacttattactggaaaaaaaaaaaaaaaaaaagggcgggcg

SEQ ID NO: 51483 - DNA, 349 bp, Glycine max
  Clone ID: LIB3167-011-P1-K1-H6
atttcattcttgattttgatgcatacttgtccagtgtcggtagataaaatattaagttgcctcttatctttagtgttttgaggattgacagcgatacaatctgtaatacactttttataacacactttctattattaggtaaaatttattgaaaaatacaaaattaccagtaagggtcattaaataaggtgttagatccaaacaagattgtgattctcaataaatttcggccaataataaggattgtgtttaagagagtgtgtcgctagcatttcttatgcattattgagttatgaactgaagctgtttctagctggaaaagcactggagatcatgacacaagaaacat

SEQ ID NO: 51484 - DNA, 169 bp, Glycine max
  Clone ID: LIB3167-011-P1-K1-H7
accacactttcgataaataacatttttatcaaagcgatatcagacaaacgtgtggcatacatatgatgtggagtgttccaacgaaaccattaatccaatctatactacactaaatctaactcactaactataattagttaaaatagcttcaacaagccaaaatttccaa

SEQ ID NO: 51485 - DNA, 365 bp, Glycine max
  Clone ID: LIB3167-011-P1-K1-H8
atttgtttttgtaaatcgattccaccaatcatcgctgtccttgtcgcgccaaatacaaaaaccaccacttctacctctctccttctgactctctcactctgaccgggtttgtgagatgtcggatgcgccaccgagcccgactcatgagagtgggggcgagcagagcccgcgcggttcgtcgtccggcgcgagggagcatgaccggtacctcccgattgccaacatcagccgcattatgaagaaggctctgtctcccaacggcaagattgcaaaggatgccaaagacaccatgcaggaatgcgtttctgagttcatcagcttgattaccagcgaggcgagtgagaaatgccagaaggagaagagaa

SEQ ID NO: 51486 - DNA, 182 bp, Glycine max
  Clone ID: LIB3167-011-P1-K1-H9
gccaatactaagtcacaaatggcgatcaccatgcacagtgttactgggatcgctgttatccagtaatggaacaccaacctatggaaactattacgtgagcgatcgataacaaacattcgtttggggcacgcgaagaatcctttaaagggatataacatttcggtttacgataggatgcttat

SEQ ID NO: 51487 - DNA, 331 bp, Glycine max
  Clone ID: LIB3167-012-P1-K1-A10
cccacgcgtccgaagaacccagcgtttatgtgaacactctgaatagatatatacagactagttatttaaactggggtaggcctaaccagcagctggatggcataagccctagccttcgaccaactcgctatagagcttgctctcaaacactgaattgccaaggctcgtgcttggattgacaacagctaccctgcacgtgactccgacgacgatgctatttgtagagacacctatgacaactttcacgactgcgtcgattctaaacactgcggcgtacaacctcacgatgctcacactataaccacctgctgcccatgacgtgatctctcac

SEQ ID NO: 51488 - DNA, 325 bp, Glycine max
  Clone ID: LIB3167-012-P1-K1-A11
gtgactcgttcttatacgggttcatttttttgtaatgtggatggcgtgcactgttcggatatcacatgaaaatgcctagctgacatgctaactgtggctgctgaggcgccggcatgtactgctcctgctgctgaggcataaagatgtaacgaaactcgagctacaccgatggaaccaccaccgagaccttggacatcggagttgcacaagctaagactcaattagagagtgctgacatgggcgttccctgtgagaacaatggctgcagatgagtagcaaaccgctcgtgctactgatgcacttgcaagtgaggcgaaggagagct

SEQ ID NO: 51489 - DNA, 207 bp, Glycine max
  Clone ID: LIB3167-012-P1-K1-A2
actcgacgcgtccgctagtcaaggagtttcatctctgcacgttgctttagaatagaaaaaaacggtgaacatttgctgaatcggcgctggatatttggggcgtccaacaatgacattcattgctctgaagtgcccctccattgaagtctgttgttgacatctacaaatgcaggattgcagcatggaacagcgaccacctcactatat

SEQ ID NO: 51490 - DNA, 401 bp, Glycine max
  Clone ID: LIB3167-012-P1-K1-A3
tcgccacgcgttcgccacgcgttccaaatccaaaccaaaatggcagcagcctcggcctcatcgaccatgatatcaacaccagccttatctccaagcacaagcatccaaaagcaccatcatttgaagccatccaacttgtgctttcaaggccttagacccctcacaaggttcacaaccaaagtgagcagcaccaccaaaagggttattccaaagggtggtgtcggtgttagagctgaactcaactcagcacttgtcataagcctcagcactgggctctccctcttcttggggaggtttgtgttcttcaacttccaaagggagaacgtggcaaagcaagtgcctgagcagaacggactcacacactttgaggctggtgacacacgtgccaaggagtatgtcag

SEQ ID NO: 51491 - DNA, 407 bp, Glycine max
  Clone ID: LIB3167-012-P1-K1-A4
gcagcagataagcactcatcattcttcgtttgtctaagatccgccttctctgaattggaaaaatgtcgctcggagaaactgcttgttcatacgcagctctcatccttcatgaagatggaatcagtgtaactgccgacaagatcagcaccttgttggaaactgcaaaggttcaagtagatacctattggccaaccttatttgctaaacttgctgagaagaaaaatcttggcgatttgatagccaatgcagcaggcggtggtgcaccagttgctgttgcagctgcccctgttgctgcctcaggtggtggtggtgctgctgctgccgccccagctgctgaggagaaaaagaaggaggaacctgaagaagagagtgatgatgatatgggatttggcttgttcgattaggga

SEQ ID NO: 51492 - DNA, 242 bp, Glycine max
  unsure at all n locations
  Clone ID: LIB3167-012-P1-K1-A6
gcgnncggggacncaaccatatacgccttcattttcttgtaatagggaaggcgtgctctgtgcggagatcacatgaaaatcgcctcgctgacatactaactgtagctgctgtagcgccgccatttactgctcctgctactgaagctgatagatgtacccaaacttgatctacactgatgggaaccaccaccaagacctgtgacatcggagctggacaagctaagactcagttagattagttt

SEQ ID NO: 51493 - DNA, 386 bp, Glycine max
  Clone ID: LIB3167-012-P1-K1-A7
aaagagcgttctcaaaatgcaaacagacttaacctttgctgcccgaaacgttgtgccattggcacccacaaagagtgtctcccatattaccatctttcccaccaaattgaaagccccgagcttcttacctagttactctacgattagggttgcaacctgtgagcccgacacttcaactgacgactacaactatgagttctcagcgtttcctgcagaagcatgccatactgttggtggggaagcctgcatgacggagatgtaccctgaaacgaagctacaggcagaggctaagactccacgagtcgtcacagagaaccttgagagagagtttcttgaatacgatgatcctaaaacggtgtttcgaggagaggcttgtgatgatcttg

SEQ ID NO: 51494 - DNA, 364 bp, Glycine max
  Clone ID: LIB3167-012-P1-K1-A8
aacgagctcttgcaaaatgaacacagattgaaccttctctgcccgaaactttatgccatgtgcacccacatagagtgtctcagatattagcattgtttgccaccgatatacgtaagctgacctgctcttcgttcctacttctgatggcgtggaaccctgagcccgacacttctctgtcacgacaactatgcgttctcagtgtttcctgcagaagcatgcgatgctgcacgaggagaaacctgcatgacggagatttactcaaatacgaagatacagccctaggcttagactccacgagtagtcacagagaaccgttagagagagatcctgaatactatgatcctaatacggtatttccaggaga

SEQ ID NO: 51495 - DNA, 354 bp, Glycine max
  Clone ID: LIB3167-012-P1-K1-A9
agcatgcgctgacggaatggatctagatgtgcctgccgatgatgctatggttgacggagcatgatggtgccataaaggatattgacccaaagaactatgctttaagggcgagtgcgctcgatatctgtatgatactatctaagccaggagattcactgtgagcctaatctattggtttgtgtcaatacctgaactatggtttctcatgcgactcctcataacaatgctaaagttcgtggtggtaccttgcaacgtaattggcatgctcaaaagcgattgaaaaaggcccatggtggcactctcgagagagtccatgggaacataaacacgacacactaatgcatagatcattat

SEQ ID NO: 51496 - DNA, 405 bp, Glycine max
  Clone ID: LIB3167-012-P1-K1-B1
gggaagaggaaccctagctagggtttggaagaagctgatccgagaagatggtgcagcgtctgacctaccgcaaacgccacagctatgctaccaaatccaaccagcacagagtcgtcaagactcccggtggcaagcttgtttatcagaccacgaagaagagggccagcggacccaagtgccctgtcactggaaagaggattcaagggattccacatttaaggccagcagagtataatagatcaaggttacacagaaaccgaaggactgtgaaccgtgcatatggtggtgtgttgtctggcagtgctgttagagaaagaatcattcgagctttcttggttgaagagcaaaagattgtgaaaaaggtcttgaagatccaaaagacaaaggaaaaacaagctttgaagg

SEQ ID NO: 51497 - DNA, 398 bp, Glycine max
  Clone ID: LIB3167-012-P1-K1-B12
gtgactcgttcttattcggcgttatcttcttcttttggggaaggcgtgcacggatcggctatcacctgaaaatgtctcgctgccgtggtaactgtggttgctgaagcgcctgctagtgctgctactgctgctgaggctgcaagatgtacccagacttgagctacaccgagtcaaccaccaccgagacctgggtcatgggagtggcaccagtcaaggctcaattcgagagtgctgaaatgggtgttcccgctgagaacgacagctgcaaatgtggagctaactgcacctgcaaccgatgcacttgcaagtgaggtgttggagagctaaagctccaagcagagatggcccttagaaataatgatatacactatatgtagcttcaaaacttcaaaattatg

SEQ ID NO: 51498 - DNA, 404 bp, Glycine max
  unsure at all n locations
  Clone ID: LIB3167-012-P1-K1-B2
ccggcctttagggaaaaaaagacgaaatttaaaaatcccttctctttttgtttccctcgtgtggctcttacatggaaaaaatggcggcagcttctagaaaaccaagaagcgcaccatttggatccctttcttcaaccgctatgttctgcaactctcactctacatgatcatcttcttcttcctcgagctttcgcttattgcaccttcagcttgacctgtcgctcctcctgcttctttcaccgctcttgctctgcaacacgtgtcaacctctacggttccaccgctccctgcgggcgggtgtccctcgaccgttcgggctgtacgaaccgttccatgtnggcggcgccgagaaccgtcgcttcaaggcagagcagtagcccgcaccaccagcagatgcggacctg

SEQ ID NO: 51499 - DNA, 403 bp, Glycine max
  Clone ID: LIB3167-012-P1-K1-B4
cgcaaactaaaatggctaatcgccgatggctaatcccttacaacgcccccttcgcgcgaccatggcccgtccgttctccaccggcgcattgcccgtaattaagcgaggcgagatcggaatggtttctggaatacctgaagaacaccttcacacgagggttctaatttactctcctgctagaactgcatctcaacaaggatctggaaaggttggaagatggaagatcaactccttatcaacccataagtgggaaaatccactgatgggctggacatccactggggacccctactctcatgttggcgattctgccttgacttttgatagcgaacaagcagcaaaagcatttgcagagaaacatggttgggagtattcggtcaaagaagcccacacaccattgctg

SEQ ID NO: 51500 - DNA, 362 bp, Glycine max
  Clone ID: LIB3167-012-P1-K1-B5
cccacgcgtccgcccacgcgtccgctcttctttgcttgctgctgctgccacttttcgctgagttgcgtcgtctctctaacaaaacaaacaaacaaaaaaaatgatttctgcgatttcgtgggtgcccaaaggggtttcgaagtcggaacttgtcgtggctgaacctcctcccgaagaggaaattcaagagataatagccaaccacgcaaccaaaagtggagacagtgacaatgaagacgctaacaacgatgacgttgtggcacaagcattaaccgtagcagacgcagttggcaaggcctccactggaacctgcgacgaaataacccttgcgttgaaggaccttgacatggacctttatgatg

SEQ ID NO: 51501 - DNA, 399 bp, Glycine max
  Clone ID: LIB3167-012-P1-K1-B6
cacacaagcaaagtagaagccatattatcatcaattaatgtccaaacaaaggttgcagggtaaggtggctattgtaaccggtggagccaccggaataggagctgaagcagtgaggatattcgtggagaacggtgcttccgtagtcatagcagacatcaaggacgaattgtgtcacaacttggcaacttcgttaggcttagacaaagtggattaccgccactgtgatgtgagagatgaaaaacaagttgaagaaacagtttctttcacattagagaaatatggtagcttagaaattttgttcagcaatgctggaatcgcaggccctttatcgagcattctagacttcgatctgaatgaattcgacaacaccatggccgtgaaccttcgcggtgcaatggc

SEQ ID NO: 51502 - DNA, 403 bp, Glycine max
  Clone ID: LIB3167-012-P1-K1-B7
cccacgcgtccgcccacgcgtccgagattgtccaagtttcgtgagaactaccactctagatgaaaccagttttatttgctttggtatagaagcaaaaacctgcatgaaatcatcttcaatcataattaacaccatccaagaattggaaagtgaagttctcaatgcccttatggctcagaacccaaatatatataacattggtccacttcaattgttaggaaggcattttcctgataaagacaagggcttcaaggtgagtgggtcaaatctttggaaaaatgactcaaaatgtatccaatggctagaccaatgggaaccttcctcagtcatatatgtgaattatggaagtattactgtgatgtccgaggatcatttgaaagaatttgcttggggactagcaaat

SEQ ID NO: 51503 - DNA, 390 bp, Glycine max
  unsure at all n locations
  Clone ID: LIB3167-012-P1-K1-C1
aatttcagccccataccatactcattaaagtccacacacacagagcaacactgcactgtgtggaaacgaaacatggcaagagtggtggcactccaacagaaccaactatctttctctaccttagcttcctctctttctgacttcagtggaaccagacttcaaactcaacttcagttcaagagaaagcaatgccatccaaaagggtctttctacgtctccgcatcgagcaccaagaaaatcctaataatgggaggcaccaggtttattggtgtgtttttgtctaggctccttgtcaaagagggtcaccaggtgactttattcacaagaggtaaagcgcctgtcactcaacagttgccaggtgaatcagacagtgattatgcntgattttct

SEQ ID NO: 51504 - DNA, 328 bp, Glycine max
  Clone ID: LIB3167-012-P1-K1-C10
cttaatcatacaagtcctcacctactttactcacactacctaccccaaatctcaccggtgcatgtcaatgtagcgcccacagtcaagctttgctcctctgaccatctctagctatagtcacgatagcaggttggaatcatagtgtctggggctgaagctaggcccatagcattctatgtgttcagagattcactggtgcacattgaagatcacaacctcttggccaaccagatacgtgccgatgctgccacttactggaatgaatacccttcctgtcatatgaccaactacttgcttctgcaaggactacatacattcccgatcttat

SEQ ID NO: 51505 - DNA, 399 bp, Glycine max
  Clone ID: LIB3167-012-P1-K1-C11
ttcactcccaagctccatggccgcaaaccttttacccctttcaatttcatgctcgtcgaaaacccacattctctgtcttccctcccctcccaaacccctctttctctgccgccactctctgctccgttaccgttccactccgcgactcacatgtaaggcagcccaagtttcggtcgccgaagagtcgtcggcgtccggcgacaactgggttccggtggtgcctctgtctgctctgccgaagggggagcggcgcgtgatcattcaggacggcgagaccatactgctgctttggtacaaagaccaagttttcgctattgagaataggtcccctgctgaaggcgcctatactgaaagcttgctcaatgccaagctcacccaggatgggtgcatagtttgccc

SEQ ID NO: 51506 - DNA, 401 bp, Glycine max
  Clone ID: LIB3167-012-P1-K1-C12
cccacgcgtccggtttcctctgctaattccatatccccgttttccttcactctggaagcccgattcatttccaccagcacaagaagcatggctgcaatatcaataccttctcacatgaaagcttggacatactctgagtatggaaaatccaaggaagttctcaagtttaatcagagtgtggctttgcctgaggtgaaggaagaccaggtcctcatcaaggtcgctgctgcttcccttaaccccattgatcataagagaatggaaggctatttcaagaacagcgactcccctttacctactgctccgggttatgatgttgctggagtggtggttaaagtgggaagtgaagtgaagaaatttaaagttggggatgaagtttatggtgatatcaatgtgaaagc

SEQ ID NO: 51507 - DNA, 341 bp, Glycine max
  Clone ID: LIB3167-012-P1-K1-C2
attatttgtcgcaccatgactaacacctcgtccctcacaatgcagctagcaatggcggacaacagtgcagtttcaccagcgccgctcctacctgagtcatttctacggacatacgtctccggcgtctgcaacaagctgactccccaatccattacgctttcacgccccaaggccctcagcgtcttcgccgacaccaagaatgcgcgtcgacgacctcaaggggacctgcgtcgacgaaagcgtatccacactcatacaagaagacgatggccctacgacagattatggtcggatctactgccttactccggggcttcatggttttcacctacacgtgtatc

SEQ ID NO: 51508 - DNA, 408 bp, Glycine max
  Clone ID: LIB3167-012-P1-K1-C3
cccacgcgtacggtgaattgagttcactgaccacatgttgcgccccaacactcaactcggctcgtcgctatggctggcgtgcttctcatccatatcaaacaaagtgtagatcaactatcatggcagctccattttcatcctccaatgaatcaccaatggggcacacattccttgtcactgcatgttcctctcttagggctcaactgtcttgttgtttccttcagcccctctctttgttaacgctccaacagcgattctttccccgccctgtgcaggaacatatggcaatcgggtgaagatagactgattaataaaaattctgctgcgaaagcagtgtattgtgatgaattttggacaccggcgaggagttcacctgatgatatttggtccataacgagtgattagcaa

SEQ ID NO: 51509 - DNA, 405 bp, Glycine max
  Clone ID: LIB3167-012-P1-K1-C5
cgagtcgccatggcgtcgcaggagagtttcgaaaagatgcaggcacggcagaattaccggaatttatggcacaccgatctcatgagatccattcaggccgatactccttattgttgcctcgcgttgtggtgtgcaccatgtgtgtcttaccttcttcgcaaacgagctctctatgatgatatgtcaaggtacacatgttgtgctggctacatgccttgcagtggtaggtgtggagaaagtaaatgtcctgaattttgcctttgcactgaggttttcctctgctttggaaattcagtcgcctcaactcgctttctattgcaagatgaatttaacattcaaactacgcaatgtgataattgcattattggtttcatgttttgccttcaacaaattgcatgtatattc

SEQ ID NO: 51510 - DNA, 101 bp, Glycine max
  Clone ID: LIB3167-012-P1-K1-C6
tttacccctttcaatttcattctcggaggaattcccacattctctggcgtcccttccctcccaaacccctccttttttttccttcactctcttttttcatt

SEQ ID NO: 51511 - DNA, 389 bp, Glycine max
  Clone ID: LIB3167-012-P1-K1-C7
cccacgcgtccgcccacgcgtccgctccaaacactctagaatttgcatgcactgttcttcatacaatggcattacgcgagcttcttatgatggggatattgctgctggtatgtcttgctaaggtttcatctgatgttaacatgcaaaaggaagaagatgaagaacttcgctttcctaatcaccctcttatcgtgagagacgggaacagaaggctaatgcaagacatagattgcggaggattgtgcaagacaaggtgcagtgcccattcgaggccaaacgtgtgcaacaaggcttgtggcacgtgttgtgtgaagtgcaagtgtgttcccccaggaacttcatgcaacagggagctctgtgggacctgctatactgatatgatcactcac

SEQ ID NO: 51512 - DNA, 405 bp, Glycine max
  Clone ID: LIB3167-012-P1-K1-C9
cccacgcgtccgcgaaattgattctctgccacttaacctaaaatggaaatctttccgattcccgccgaatcctacactctcggcttcatcggcgccggaaaaatggccgagtccattgcccgaggcgccgtccgctccggcgtcctgccgccttctcgcattcggaccgccgtccacttcaacctcgcccgccgtggcgccttcgagtccttcggcgtcaccgttctcccttcaaacgacgacgtcgttcgcgaaagcgacgtcgtcgttttgtcggtcaaacctcaattagtgaaagacgtggtgtcgaaattgacgccgcttttgacgaagaacaagcttttggtttcggtcgctgctggtaccaaattgaaagatcttcaggaatgggctgggaacgacaga

SEQ ID NO: 51513 - DNA, 380 bp, Glycine max
  Clone ID: LIB3167-012-P1-K1-D10
caaaattaacaagtcctcaatttttttaacacactaccaaccccaaatcctaaggtgcatttcaatatggcaatcttgtcaagttttgctcctttgaccattcttagtttagtcttgtcagtggttggaatcattgcgtctggggttgaagctaggccaagagcattctttgtgtttggagattcacttgttgacaatggaaataacaattacttggccaccacggcacgtgccgatgctcctccttatgggattgattaccctccaagtcatagaccaactggttgtttctccaatggctacaacattcctgatcttatcagtcagagacttggtgcagagtcaacattgccatacttgagtccagaattaagaggaga

SEQ ID NO: 51514 - DNA, 406 bp, Glycine max
  Clone ID: LIB3167-012-P1-K1-D11
cccacgcgtccgggactgaaatcggtggagaacgcgcacgatgattcggtgtgggcggtcacctgggtacccgcaaccgccaaccgaccaccgctcctcctaaccggttccctcgacgagaccgtcaggctctggcgctccgacgacctcgttttggaccgcaccaacaccggccactgcctcggcgtcgcctccgtcgccgcccaccccctcggctctgtcgccgcctcctcctccctcgacagcttcgtccgcgtcttcgatgtcgattccaacgccaccatcgccaccctcgaggctcctccctctgaagtttggcaaatgcgcttcgatcccaagggtgccattctagcagttgctggcggaggtagtgcatctgtcaagctttgtgacacttcctcatggg

SEQ ID NO: 51515 - DNA, 401 bp, Glycine max
  Clone ID: LIB3167-012-P1-K1-D12
cccacgcgtccggtttcctctgctaattccatatccccgttttccttcactctggaaccccgattcatttccaccagcacaagaagcatggctgcaatatcaataccttctcacatgaaagcttggacatactctgagtatggaaaatccaaggaagttctcaagtttaatcagagtgtggctttgcctgaggtgaaggaagaccaggtcctcatcaaggtcgctgctgcttcccttaaccccattgatcataagagaatggaaggctatttcaagaacagcgactcccctttacctactgctccgggttatgatgttgctggagtggtggttaaagtgggaagtgaagtgaagaaatttaaggttggggatgaagtttatggtgatatcaatgtgaaagc

SEQ ID NO: 51516 - DNA, 328 bp, Glycine max
  Clone ID: LIB3167-012-P1-K1-D4
ccgggttggccccacccttccggaaaaataagccaactgttggccaaaagttttgcagcctcggggataagggcttcaatggcaaaatcctgcaaactggacggttcatgtaaccagtcgatatctagccggaaatactcagacctttacggaacaagaccaatgacgtgcaacaagtcgatctcccaccgctccttcacgttcggcggtctcgcgagctggcaaacgctcatcatcctcctactggatggcgaggacgtcatcaatacgggcaagggcatgcaggccatgagcaccaggatccacatggaaggccacacctggatca

SEQ ID NO: 51517 - DNA, 405 bp, Glycine max
  Clone ID: LIB3167-012-P1-K1-D5
cccacgcgtccggaaatttccgaaagtgtgtgtgggatgagaagatgatgaggaaccatgggtagaagaaattggagagagagagagagagagagggttggattggttttcttcttcctcttcctaaagagaatctaatctcaatcctcattacacacatatctacagatttcttcattcctctctcaatcttttctgttttcttttcccctctttgacatcctcgttttcgccgaaacaaaaacaactaagattttgttttttgttgtatttttcttcctgttgttatttgactcggttgtctgaatcagttgttgcagcagggtcgggagccacagctatgcagagccaagttgtgtgcaatggttgtaggagccttctgctttacccaagaggagcaaccaa

SEQ ID NO: 51518 - DNA, 180 bp, Glycine max
  Clone ID: LIB3167-012-P1-K1-D7
cccactcgtccgatcgcgagcgccgcccttttaattttattttagtatttaaaagttgtggtttatgtttttgttcaattagtgttatgactgtttgggctttgattaaacctttattcaatactgttttgcgttggattacttatcatccgctttaaatatattgttagttcggtttat

SEQ ID NO: 51519 - DNA, 304 bp, Glycine max
  Clone ID: LIB3167-012-P1-K1-D8
cccactcgtacgcggacgcgtgggtttatacggacctaacggactctactctggctgtgtctgagacattaaagattgacgctaagcaattatcgcgtggagtacagaacttagatggagtccgaaagtagagaaaaactaaagggtgcacattgtgtatcgtgatttacagggtataactgacagaatatttaacacctataggcctagaacgggatcagatgatggacgtgcagttggatacaatcgctgctcacgcactaaaagtaggtagactatgaccgcacctggagatggataacag

SEQ ID NO: 51520 - DNA, 245 bp, Glycine max
  Clone ID: LIB3167-012-P1-K1-E10
cccacgcgtccgcccacgcgtccgtggatggtgaagagttcatgagtctattcattgatggaaaagccgaattatatgttgcataatcatacacgcaagtcacagaattatgtttgtactataaaatacgctctgacttgtacactgtaagaatcaataattattttatcaaattcaaggagaaaaaacaattagcacagcagcttacgcaataaataaataaaaaatatggttctacggctgac

SEQ ID NO: 51521 - DNA, 109 bp, Glycine max
  Clone ID: LIB3167-012-P1-K1-E11
ccataattatatcccccttaatcatacacccaattcacataattatttttttactataaaatactctcttacttttacactctaataatcaataattattttatcaatt

SEQ ID NO: 51522 - DNA, 404 bp, Glycine max
  Clone ID: LIB3167-012-P1-K1-E12
cccacgcgtgcgctcgcaagcaaattgaatgaatcccaggcgaggagaaagatggaggggaaggagcaggatgtgtcgttgggagcgaacaagttccccgagagacatccaattgggacggcggcgcatagccaagactactgcaaggactaccagtagccgtcgccggctccgctggttgacccgacggagtttacgtcatggtcgttttacagagcagggatagcagagtttgtggccacttttctgtttctctacatcactgtcttaaccgttatgggagtcgccggggctaagtctaagtgtagtaccgttgggattcaaggaatcgcttgggccttcggtggcatgatcttcgccctcgtttactgcaccgctggcatctcatggggacacataaaccc

SEQ ID NO: 51523 - DNA, 407 bp, Glycine max
  Clone ID: LIB3167-012-P1-K1-E3
agaaatttaactcgaccttgtatgatgaatgggttaacaagggcaatgcaccggcactgcccgagactcttaagaattacaacaagctggtgtctcttggcttcaagattatattcttgtcaggaagaacactggacaaacaggccgtaacagaagcaaacttaaagaaggctggctaccacacatgggaaaaattaattctcaaggatccacaagatccttccactccaaatgcagtttcatacaaaacagcagcgagagagaaactgataaggcagggatacaacattgttgggatcattggagaccaatggagcgatctcctcggaggccacagaggcgaaagcaggacctttaagcttcctaatcccctgtactacattcagtagttccttcacctctcaaca

SEQ ID NO: 51524 - DNA, 409 bp, Glycine max
  Clone ID: LIB3167-012-P1-K1-E4
gcctatccattcctattaattccaaggttagtgcgagcgaggaatttgggttcttttgggccgtactttaatctaacagccgcaaacagaaatggaagctgcgtgtggaagtgtttgggtcacatcctgtcttgcacgctcacccaagtccactctgtctctattccgctctactaatcaacacctaacagcatgttcttcacaatcccatcttttcttatatgaccgtgctgcctatgctaatgctaaaaccgtccgcgccagaacctgctccaaacccggcattttccttccccacttaatcgcttctctggaacaagttgaccagacttacataatggtcaagcccgacggcgtgcaacgtggcctcgtgggagaaattatttctaggtttgagaagaaagggttt

SEQ ID NO: 51525 - DNA, 343 bp, Glycine max
  Clone ID: LIB3167-012-P1-K1-E5
cttccggtatgccaccaagggaagttgcatggttatttacaaggttctccgaagcattggtgtgtatgtgcatcaatggtggggagactgaactgcattgtacctttgatgattattgtggtgttagagaaacctgtgtatgtacaagtttctcttgtgtttgatgtatttggattctagtcgtccaactttgtctgtgttgttgttgtgctgtgtttgttgtctgtgaaagtgtgtaggatgctatgaacatccgagtgctttatggttgggcgcttaattctaaataaacaaccaatgtcgttgtcgtttgctaataaaattaatctgtgatgattgtgtt

SEQ ID NO: 51526 - DNA, 429 bp, Glycine max
  Clone ID: LIB3167-012-P1-K1-E6
tccgggttggaccacaggcgtccgttagatcggaagggcgcctttttttttttttttagctaaaatgcaaaatttttattggtggaatttttcacatggaatacacaggagaagtgggactccaagaaagatcgaagcctttcaagtttcaaccatcacaacattattattacccaattacgaacgaaatgttcgttggctatacggaatacaaaagtacacagtacaaaggatgatgaataacgaatatagcgaattagaaccttgagacactacttacattaggaaactacacattatagaagtgtttattcattaatagcagacgaaacccttgggaacaccctttccacagtagttgagtagcaagctcaagttcactggaacattgaggttgatgcccaacacattagctttgagagcagtgca

SEQ ID NO: 51527 - DNA, 305 bp, Glycine max
  Clone ID: LIB3167-012-P1-K1-E7
tctggttaagcttgtatcaatataattgacttatcatcccctttctgctgtatatagggtaaccaaaaataaaaaaaaaagaaaagaaaaaagaaacaggagcagaaaaagaaagatgctggagagtgaatcaagtaggatagaaggtggatcttaacagaagagatgctaaatgttataacagtacgatcctggcggagcagcttgatgtggccacgatgatcacctgcgttgcgctgtcaacacgtgttttattcgctccaataatagtattccgctgtacgcgctttactaaccgataggaa

SEQ ID NO: 51528 - DNA, 85 bp, Glycine max
  Clone ID: LIB3167-012-P1-K1-E9
cggttccggtaattcccgtggtcgacgccatcgccgtccgtgcacatttaacctcgatccttgtattgatgatatggtgttaaca

SEQ ID NO: 51529 - DNA, 377 bp, Glycine max
  Clone ID: LIB3167-012-P1-K1-F1
gcccctcgcacggataacgctcagacttactttgcgattacagctgactccatctgtacggcgagttccgggctggcgagtggatcatgaggatgttttcttagtggctgggaatggtcggtgaaaacggagagagcagcaccttggatgacgatcgatgggcactacattgtgcgcagattctgagcctgacagacctctattgttaccaggctgaacccgtactccatggcttgatggcactctacctggagacttcagatttgaccctcttggtcttggatctcacccggagagtctgagatggaatgttcaggcagagctagtgcactgcaaatgggcaatgttggctgctgctggcatctgtattccagaat

SEQ ID NO: 51530 - DNA, 386 bp, Glycine max
  Clone ID: LIB3167-012-P1-K1-F11
gtttgaagtatcttcgaggaatatctatctttgggcgccacttatttcgaattgatgctgttcccttgagtttgactataatttggatctatgcgtcctttttaacagctggtggagcatataattacaaaggatgcaatccagatataccaagttcaaacattttgttggatgcatgtagaaaacatgcatataccatgaagcattgcaggactgatgtttccaatgcattgtctactgctgcatgggtcagaatgccataccctttacagtggggtatccctattttccattttaggacttccataatcatggtcatagtgtcactggttgcctctgtggattcagttggaacttatcgtgctacatctctgcaagttaattcg

SEQ ID NO: 51531 - DNA, 378 bp, Glycine max
  Clone ID: LIB3167-012-P1-K1-F12
ttcatgaccctgcccaacatcaaggttcctctcattcttggtatctggggaggcaagggacaaggaaaatctttccaatgtgagcttgtctttgccaagatgggaatcaaccccatcatgatgagtgctggagagttggaaagtggaaatgcaggagagccagcaaaactgatcaggcagagataccgtgaagccgcagacttgatcaagaagggaaagatgtgtgctctcttcatcaacgatcttgatgcaggagctggtcgtcttggtggaaccacccaatacactgtcaacaaccagatggtgaatgccaccctcatgaacattgctgataaccccaccaatgtgcagcttcctggtatgtataacaaggaagag

SEQ ID NO: 51532 - DNA, 103 bp, Glycine max
  Clone ID: LIB3167-012-P1-K1-F2
cgccactccggcctgtgatggccttccgtactcctgaacatgcactgatggtggtgataaggtggctggcggacaaagagaagtctgagtggaggaagtgaaa

SEQ ID NO: 51533 - DNA, 401 bp, Glycine max
  Clone ID: LIB3167-012-P1-K1-F3
cccatgctttcgtcaccacttacagtcttaggctgatgctggtgcattacatactttgtgcgagcaagctggaacgatccgcgcatacggttacattgccatcaagaacaagccatgcacggttgtggaggcttcaacttcaaaaactgtctagcatgtgacacgcaaagtgtcactttgttgcaattgacatcttcactggcaaaaagctcgaggatattgtcccatcttcccataactgtgatgatccccatgtaaatcgcattgactaccagctcattgacatctcagacgatggatttgtgagtctgctgactgagactggtggtactaaggatgaccttaggctcccaaccgatgaaaatctgctttcgcagatcaaggatggatttgctgagggc

SEQ ID NO: 51534 - DNA, 192 bp, Glycine max
  Clone ID: LIB3167-012-P1-K1-F4
ggggacccacgcgtccgcaggtaccgtgatcggagcaagccactctcctcctgttagcatagccacagaacggcggcgggaagaccagttggctcagattagaggaatttcttgatagatgtcagaatataattttaaaaaggttgtcttttatatcccaagacttacataaaaagtgcttttggagagttt

SEQ ID NO: 51535 - DNA, 185 bp, Glycine max
  Clone ID: LIB3167-012-P1-K1-F5
cgtccgcagttaccttgatcttaacaaacaactttctttttttaagcatacccacaaaaggactgattgatttccattttgctcaaattaattaaatttcttgataaatgtcaaaatttaattttaaaaaagttgtttttaatatcccaaaacttacataacaaatgcatactttttagtttttt

SEQ ID NO: 51536 - DNA, 411 bp, Glycine max
  Clone ID: LIB3167-012-P1-K1-F6
cccacgcgttcgagaggagttgctgtttaggatccatctgctccccatgaagttcggctgtggatcgaggactatcctgatccttctgatgggctagagatatggtatgctatcaagtcttgggtggaagaatatgtctcattctactacaagtcagatgaggaacttcaaaaagaccacgagctccaagcttggtggaaagaacttgtcgaggtgggtcatggagatttgaaggataagccatggtggcaaaagatgcaaactcgtgaagagttggttgaagcttccgctaccctcatatggattgcttcagctcttcatgctgctgttaactttggacagtatccatatggaggtttaatcctgaataggccaactattatcaggagattcatgcctgagaaagggtct

SEQ ID NO: 51537 - DNA, 400 bp, Glycine max
  Clone ID: LIB3167-012-P1-K1-F8
cccacgcgtccgtaccaatctacaataaacgatgattctcattatctccctcatgttttctcttctctctttctcccatgcttctgtcctagatttctgtgttgcagattatgcaggtcctattggacctgcaggatattcctgcaagaagccttcaaaggtcacagcagatgattttgcttacagtggccttggcattgctggtaacacctcaaacattatcaaagctgcagtgacccctgcatttgatgctcagtttgctggtctcaacggtcttggcatttccgcagcacgtttggacttagcagcaggtggagttataccacttcacactcatcctggagcttcagaattacttgttgtaattgaagggagcatcctagctggattcatttcttct

SEQ ID NO: 51538 - DNA, 276 bp, Glycine max
  Clone ID: LIB3167-012-P1-K1-F9
tttttgttttttttttttttttttttttttttttttttttttttttttttttttttttttttttttttttttttttttttttttttttttttgggaaaataaaaaaaccttaatttttggttttttttttgggactttaatggaaattaatggatgaaaactaaaaaataagcttttttgtttggttgctttgtttaaaaaaaaaaaaaaaaaaaaaaggggggcccttttaaaaaattaaaagttaccattgcgtgaattcaaaataataacttt

SEQ ID NO: 51539 - DNA, 395 bp, Glycine max
  Clone ID: LIB3167-012-P1-K1-G1
cccacgcgtccgcaaaagcatgcgtgattttgtcagagttgctatgagtcaagcacagaaaggaactaaattatctggggatacaaattttagccggattatctgttcaagaggggattctgatccttttgatggactctatgttggtgcatttggcccttatggcatggaaatagtgcatttgaggcgaaaatttggacattggaatgaagtggacaatgaaaacaaaacttcagatgtgggattctttgaatatgtagaggctgtgaagttaactggggatcttaatgttcctgctggcctggtgacattccgtgctaaaattggcagaggcaatcgcatcaccaaccaagggatgtatcctgatgatttaagagtggttgctagttataaag

SEQ ID NO: 51540 - DNA, 365 bp, Glycine max
  Clone ID: LIB3167-012-P1-K1-G11
ctagaatggaatttcgatgctcagtcatctcttttaccattctcttctctcttgctcttgcaggagagagccatgtccatgcatcgctacctgaggaagattattgggaagctgtttggccaaacactcccattcccactgcactgcgagagcttctaaagcctctccctgcaggtgttgaaatcgatgaactccctaagcaaattgatgatacacagtacccaaaaacattcttctataaagaagaccttcatccaggcaaaacaatgaaagtacaattcaccaagcgtccctatgcacaaccttatggtgtatatacatggttaacggatattaaagacacctctaaaaaaagatatagtttt

SEQ ID NO: 51541 - DNA, 254 bp, Glycine max
  Clone ID: LIB3167-012-P1-K1-G12
cccacgcgtccgtaaaaagatagttacaattgcttggacccccaagcgtataccagagtccagaggaattacaggtgataagtgttattttgttttagtcctgaattgtttgaacttgaggtttcccttgtataggatcatttcaacatgttatgaaatgagaaagcactgcaaggtgtgctactcatgagtaatgttcctgattgtaaacattttttgttctactagtttgtgcttcacattctccactgttg

SEQ ID NO: 51542 - DNA, 406 bp, Glycine max
  Clone ID: LIB3167-012-P1-K1-G3
cccacgcttccgcccacgcgtccgattgtttgttgttgtaactcgtccttcttctttggtggttctgtgttggggttggtttttcctctcacctgaaaatgtcttgctgcggtggtaactgtggttgcggaagctcctgcaagtgcggcaacggctgcggaggctgcaagatgtacccagacttgagctacactgagtcaaccaccaccgagaccttggtcatgggagtggcacctgttaaggctcaatttgagggtgctgaaatgggtgtgcccgctgagaacgatggctgcaaatgtggaccaaactgctcctgcaacccctgcacttgcaagtgaggtgttgggagagcaagcttcaagcagagatagcccttaattaggaataatgataaactattaatgtg

SEQ ID NO: 51543 - DNA, 392 bp, Glycine max
  Clone ID: LIB3167-012-P1-K1-G5
tctaaagcctgatttagctgctccaggggttaacattctagctgcatggtctccaatggctcctatctccggagttaaaggagataagagaatttcaaaatacaatatactatatggaacttcaatggcatgtcctcatgttactgcagcagctgtttacatcaaatcatttcatcccaactggtctcctgcagtgattaaatccgcattaatgacaactgctactccaatgcgtgatatacttaatcatggaaatgctgaatttggttatggtgctgggcaaatcaatcctatgaaggcagtaaaacctggattagtttacgatgctactgaaattgattatgtcaagtttctgtgtggagatggttatagtggatttatggacaaaatta

SEQ ID NO: 51544 - DNA, 374 bp, Glycine max
  Clone ID: LIB3167-012-P1-K1-G8
cagcattccatgggcggctgtaaagacctcaatggaggatgtgcacatgctgggcgagttctagccaaaggcactgtgtggcttaaaaacaacaaagggaatcctgatgcactattttacggatgccagagctgacctaagaaactgagaagatgccgagtatcttgacatcacatactatcgcattgaagacccatcggctcgtaggctttgccgagacatacttgctgagataggccatattggatcgttcaaatgtggcgggttaccccactgggagtaatatagtaacgtaacattgttaggaacaatgtataaagatcacaatgcacaccaatttttggaagctgaagatgtgtatgatccacaagggc

SEQ ID NO: 51545 - DNA, 411 bp, Glycine max
  Clone ID: LIB3167-012-P1-K1-H1
ccaagtcttacgtccaagcgtccattttttttttacctctttccaaagcccaaattcgttgggtcacccaaaccaacccaacccaaaacgccagcatcctcaccctcatcaataatatcaacaccagcctcatctacaaccatccaaaagcaccatcatttgaagccatccaacgtgtgctttcaatgtcttagacccatcgcaaggttcaccaaagcctcatcaaccaaagtgagcaccaccacctaaagggctattccaaagggtactcttagagctgaactcaactcagcccttgtgatacgcctcaccactggcctctccctcttattgggaaggttcgcgttcttcaacttccatagggagaacgtggcaaagcatgtgcctgagcagaacggactcacacacttt

SEQ ID NO: 51546 - DNA, 185 bp, Glycine max
  Clone ID: LIB3167-012-P1-K1-H10
gccactcgtccatgctactcatcataatctttaaaccgagacatgacaagtgctgctgcaactgtacctaaccctaaggtcttcatcgacatgaccataagcggtcaacctgtcgagcaaatggtgatggacctctatgccgacgtgactcccatcaatttcgagaacttgcgcgcgctctgcac

SEQ ID NO: 51547 - DNA, 246 bp, Glycine max
  Clone ID: LIB3167-012-P1-K1-H12
gaatggccggaccgacggtcgcgtccgtccacgcgtccgtgtttattttgatagctttatcatatgataaaaattcatatgataaagctatcaaaataaacaaatacccctctgcataaacaaaaatgattctttgttacctattatcttttttcttacaaaataaaaacccaaattgaattgtcgtaattttcaaacaaaacccacgcgtccgcccacgcgttcgcccacgcgtccgattgatgc

SEQ ID NO: 51548 - DNA, 416 bp, Glycine max
  Clone ID: LIB3167-012-P1-K1-H3
acccttccggtaaacacagcacctcaggttttttattttggcagatatacatgtttttggttacacaaatattttgtatctttgcttgaaggataagcatattaggttatttgaagatttggtgtaatggggttcattcagctgctttctgttgcctctttcccggtgataaaagtgttgctggttactgcaattggcttgtttcttgcactggatgacatatcaatattgggagaagattcaaggaagaaagtgaatcagcttgtgttttatgtgtttaatccgtcgcttgtgggtagcaatctggccaaaacgataacttttgagagtattgttcagttgtggttcatgccgttgaatattctttgcacattcatactaggctcggccttgggatggattttgattaaaatgac

SEQ ID NO: 51549 - DNA, 63 bp, Glycine max
  Clone ID: LIB3167-012-P1-K1-H4
taacaattgacctcaactttctcgacagaggctctctgtcggggttctctcccttccctttgg

SEQ ID NO: 51550 - DNA, 241 bp, Glycine max
  Clone ID: LIB3167-012-P1-K1-H6
tccacgcgtccgcgcctactttcataggaggatgggattgacggacctactgacgtgtctctcttagtatgaagagctgctataaattctccgacctatgcaactaactgctgaactttgacgaatgcagtgctcacacacacaatctttctcttagatacaactgctgccgagtgcaggttgccgacaactgcatgcatgcttggcttgcgatatatgtctctctcatagagagctctca

SEQ ID NO: 51551 - DNA, 404 bp, Glycine max
  Clone ID: LIB3167-012-P1-K1-H7
gtccttgttttcttcgttgctacaattttggtagcatggcaatgccatgcgtacgatatgttccctctccgaatgaacactggctatggtgcccgtactccggaggtgaaatgcgcaagttggaggcttgctgtggaagcacacaacatctttggctttgagaccattcctgaagagtgcgttgaagcaacaaaggaatacatccatggcgaacaatatagatcagactccaaaacagttaaccaacaagcttacttttatgccagagacctcgaagtccatcccaaggacacatttgtgttcagtatagatggcaccgtactctctaatattccatactacaaaaaacatggatatggggtggagaaatttaactcgaccttgtatgatgaatgggttaacaa

SEQ ID NO: 51552 - DNA, 349 bp, Glycine max
  Clone ID: LIB3167-012-P1-K1-H9
gtctcacgaccatgcgaatcatcatcaatcacatatcggaaaatgacatgtactaatgcttaggaacatgttctacaggtgcatgccaaagtgacaaacaagcgctcctttgatgtagaaattgggggtgaacctgctggcagagttagttttcgggctatttggagaagatgtccctaaaacagccgtaaatatcggggctttatgtgcaggagagaaaggatatggctacaaagggtcctacttccatcgtataatacaaaatattatggttcagggaggggacttcactgaaggaaatggaactggcggaatcagtatctatggtgatcgctttgacaatgaaaat

SEQ ID NO: 51553 - DNA, 403 bp, Glycine max
  Clone ID: LIB3167-013-P1-K1-A1
ccctttctttcaagtttcatctcttttcctcatttcattcttctaactttctctccgtttacttcacttcatgacggattcttctcctcttatccctccctcaccggtcacagtcaccgagatcgacctcgaagagggaccctccgaacaaattcaatgccggatttgtcttgaaactgatggtagaaatttcatagttccttgtaagtgcaaaggtacgtcaaagtacgtacatagagagtgtttagatcattggcgagccgtgaaggaagggtttgcatttgcccattgcactacttgcaaggctccataccatttgcgtgttcatggtgcttatagacaatggcgtactttcaaatttcggttttttgtaacccgagacattttgcttatatttctggct

SEQ ID NO: 51554 - DNA, 433 bp, Glycine max
  Clone ID: LIB3167-013-P1-K1-A2
gtccggggttccggcgcacgacccacgctttctaccacgcgtccgaactcaagcattgattccatatccaatggaagcacgtgcagggctccaaacaacgtatcgcacgaatctctgctcatcttcagcctacaaatttccaggaagggagtgagtgttcttcttaagagaggtgagtgcagagcaaaaggtggggcacctggattcaaagttgcaattttctgggctgctggaggaattggtcaatccctttctatgctgatgaagatgaacccattggtttcagatcttcatctatatgacgttgtcaacacccctggcgtcacagctgatgttagccacatggacactggtgctgtggttcgtggctttctggggcagcaacaacttgagagtgcactcactggcatggacttggtaatcatacctgctg

SEQ ID NO: 51555 - DNA, 441 bp, Glycine max
  Clone ID: LIB3167-013-P1-K1-A3
gtacgggttcggagattccgaggcacgacccacgcgtacgcgtaggagcgaaacgcatagaatcgaaagaggggaaaagaaaaagaaaagttagggttagggattttgagagatggcatcgactaagaagatcaccctgaagagttcggacggtgaggccttcgaggtggaggaggcggtggcgctggagtcgcagacgatcaagcacatgatcgaggacgactgcgccgacagtggaatccctctccccaatgtcaccagcaagattctggcgaaggttatcgagtactgcaagaagcacgttgaggcgaacagtgctgatgagaagcccagtgaggatgtgctcaaggcttgggacgtggatttcgtcaacgttgatcaggccactctcttcgatctcattctggctgcaaactacttgaacatcaagagccttttgga

SEQ ID NO: 51556 - DNA, 374 bp, Glycine max
  Clone ID: LIB3167-013-P1-K1-A7
ccctcttgatttgtagtttgttttgtgctttagataaaagttctgccaaatcaagaggggttttaagatcatagtgtgtgttttgcaacaatggctaagttctttgctgctatgatcttggcactctttgccatttccatacttcaaacagtggtaatggctgctaatgaacaaggaggccacttgtatgacaacaagagcaaatatggaagtggaagtgtcaagagttaccaatgcccatcacaatgctcgaggagatgtagccagacccaataccacaagccctgcatgtttttctgtcagaagtgctgcaagaaatgcctgtgtgtgcccccggggtattatggtaataaagctgtgtgcccttgctacaa

SEQ ID NO: 51557 - DNA, 331 bp, Glycine max
  Clone ID: LIB3167-013-P1-K1-A8
ggccacccacgcggcgtctagcgttctacaaaggatccccactaacaccaagattcccatccaaggtcttcacactgctttcccaacaccaatgcgtcctcaaagagacttgaggtgacagaattctctgggctaagatccacttcatgtgtgacatatgctaacgatgctagagaatcttccttttttgatcttgtagcttcccaactcactcccaagaccaatggatcatcaactcctgtgaggggagagacagtggccaagttgaaagtggcaatcaatggtttcggacgcattggtagaaacttccttcgctgctggcacggccaaa

SEQ ID NO: 51558 - DNA, 405 bp, Glycine max
  Clone ID: LIB3167-013-P1-K1-A9
agaatagcagatggcgatggtttccatggcattctgtgtcagcactgcgacttttccgaatctaaacaggtgtcgtggagtggcatatgcaagtttgagcaacaaagcaagtactacatctttgggagtgcgagttacagagggagaggggaatttgccgaagcttgttctcacttccccggccggtagtgaggctgagatatacctgtttggaggttgcattacttcttggaaagttcccagtggtaaggacctcctctttgttcgccctgacgctgttttcaatgggaacaaacccataagtggaggtgttccgcattgttttccacagtttggtcctggtccaattcagcaacacgggtttgcacggaatatggattggactgttgtcgattctgaaaacac

SEQ ID NO: 51559 - DNA, 426 bp, Glycine max
  unsure at all n locations
  Clone ID: LIB3167-013-P1-K1-B1
ggtccgaattccggattcgaccacgcgtacgccacgcgtncgaaaaagggagagtgcttagagagagagcaaacatattatttcattttcatctttttttgagtattcacaaaatgcaaccactggggtgccactttccccaatcagtggtctagaacccaatcttaactgcccctgggaaaaactgggtgctgtgcaccccatgagtcgcaagggggaaagggtgcaatggggagctcgatgtgactacattggttcatccactaatctgattatgggtggcttctacaaccctgatgctgtttgctggaaggtttggattggctccatcagcaaacaggaaagccactgcagggctaaagctggaggtgagggactcaggcttgcagactggtgaccctgctggcttcacccttgctgacacct

SEQ ID NO: 51560 - DNA, 411 bp, Glycine max
  Clone ID: LIB3167-013-P1-K1-B2
cgcccacgccgtccgcccacgccgtccgcggtgacccggagaagatccgcgtggcgctggagcacacggaggcggtgctgtgggtggagcaccgcaagacgcggcggccggtggcgttcgcgagggccaccggcgacggcgtcttcaacgccatcatatgggacgtcgtggtggacccctccttccaggggatcgggcttgggaaggccgttatcgagaggctgctcagggagcttcggggaaagggaatttccaatattgccctctattcggagcctcgcgttttgggcttttatcgtcctttgggatttgttgctgacccggatgggatcaggggaatggtgtactccaggaaacaaaagaaaaaataggataactcttcattttctttctctatttttttaaattatt

SEQ ID NO: 51561 - DNA, 153 bp, Glycine max
  Clone ID: LIB3167-013-P1-K1-B3
tggagattccattaaacttttatgatttgattttaatggtatttattatttattatttaggaaaaaaaaaaaaaaaaaaaaaaaaaaaaaaaaaaaaaaaaaaaaaaaaaaaaaaaaaaaaaaaaaaaaaaaaaactccggaggtgaaaagcg

SEQ ID NO: 51562 - DNA, 383 bp, Glycine max
  Clone ID: LIB3167-013-P1-K1-B7
cccacgcgtccgaatttttctctcaaccggcccaatttagcataagcccagcatggccaccgcaacagcagcagccacctcgtccttcatggggacgcgcctcctggaggcccattccggggcggggcgggtgcaggcccggttcgggtttggcaagaagaaagccgccgccccgaagaaagtttccagggggtcgggctctagctccgataggcccctgtggtatccgggcgccaaggcgcccgagtacctggatgggagccttgtcggagactacgggttcgacccatttgggctagggaagcccgccgagtacctgcagttcgagttggactcgctggaccagaaccttgcgaagaacgtggctggggacatcattggga

SEQ ID NO: 51563 - DNA, 392 bp, Glycine max
  Clone ID: LIB3167-013-P1-K1-B8
cccacgcgtccgcccacgcgtccgctctcttgttaccaagtgatgtggtgattgcagacaaatttgcccccgatgcaaacagcaaggtcgtgccagcatctgccatccctgatggctggatgggattggatattggtccagattctgttaaatcattcagtgaagcattggatactacccaaaccatcatatggaatggaccaatgggagtgtttgagtttgacaagtttgctgttggtacagaggctattgcaaagaagctggctgatctcagtggaaagggggtgaccacaattatcggaggaggagattctgttgcagcttgtgagaaagtaagagttgctagtgtcatgagccacatatctactggtggtggtgccagtttggagtta

SEQ ID NO: 51564 - DNA, 400 bp, Glycine max
  unsure at all n locations
  Clone ID: LIB3167-013-P1-K1-B9
gataactagaaacagtgtgatgaaaatgaaggtccttgttttcttcgttgctacaattttggtagcatggcaatgccatgcgtacgatatgttccctctccgaatgaacactggctatggtgcccgtactccggaggtgaaatgcgcaagttggaggcttgctgtggaagcacacaacatctttggctttgagaccattcctgaagagtgcgttgaagcaacaaaggaatacatccatggcgaacaatatagatcagactccaaaacagttaaccaacaagcttacttttatgccagagacctcgaagtccatcccaaggacacatttgtgttcagtatagatggcaccgtactctctaatattccatactacaaaaaacatggatatggngtggagaaa

SEQ ID NO: 51565 - DNA, 356 bp, Glycine max
  Clone ID: LIB3167-013-P1-K1-C1
aagatgtctaaccgtggtcgtggtgtttcggctgagaacaagttccgcatgtcgctgggtctctcagtggcggcgacggtgaactgcgccgacaacacgtgtgcgaagaacctctacatcatttcggtgaaagggatcaaaggccgtgtgaaccgtctttcctcggcctgcgttggctacatggtgatggccaccgtgaagaagggaaaacccgatctgacgaagaaggtcttgccagctgtcatcgttcgccagcgcacgccatggcgccgaaaggacagcgtctacatgtacttcgaagataatgctggtagtattgtcaatcccaagggagaaatgaaaggttctgctatcac

SEQ ID NO: 51566 - DNA, 336 bp, Glycine max
  Clone ID: LIB3167-013-P1-K1-C2
ctttcataaagcgtacagtgtcaaccttttgtgacgacaacgttgtgccatggcctcccacatatagtgcgtctcatgtagaccagatttacacagaaacaagagcccggtgctattcacgtgactactcttctgtgcgtggtgcgaccggcgagcccgtcgctctaactgtaaactacaactctgcgctctcagggttcactgaaaagcattgcaaactgtaggatgtgaagccacggtggctattatgtacgctggaacatatgtgcatgccaaggcttagactccacgagctgcaacagagaacagcgagagagagtctattgatgctacgat

SEQ ID NO: 51567 - DNA, 402 bp, Glycine max
  Clone ID: LIB3167-013-P1-K1-C3
cccacgcgtccggagatggggaagaaagaaaaagctaaggaacgaagagaacaacgattgcaagagatacaccttcagaggaccattccctattctcatcaccagaggtggtggtccaaggaaactgtggctgtggttacaggtggaaatagaggaatcgggtttgagatttgtagacaacttgccactcatggattgactgtcatactgacatcaagagacgctagtgctggtgttgaatcagttaaggctttgcaagaaggtggtctcagtgtggtttatcatcaacttgacgtagtagactattcatccatcaaccagtttgttgagtggttgcgggaaaattgtggtggtttagatattctggtaaataatgctggtgttaattttaatcttgggtct

SEQ ID NO: 51568 - DNA, 403 bp, Glycine max
  Clone ID: LIB3167-013-P1-K1-C7
gcggttcaaccttggagagggtttagagaagaaaagccaggattttgctgctgaagtagcagcacaaactgcagcaaaaccagcacctatgccagcgaaagagcaacctgctgttccagaagccaaggagaccgagccaaagcaatcaacagtagcagtctcagcctcattggttaagcaactgagggaagaaactggagcaaggatgatggactgtaagaaagctctagctgaaactggaggggaccttgaaaaggctcaagagtacctcagaaaaaagggtctctcaaccgctgacaaaaaatccagcaggctagcagctgaaggcagaattggttcatacattcacgattcacgcatcggcgttctaattgaagtgaactgtgaaactgactttgttggt

SEQ ID NO: 51569 - DNA, 299 bp, Glycine max
  Clone ID: LIB3167-013-P1-K1-C8
cccacgcgtccgcccacgcgttcgcccactcgtccgcccacgcgtccgcccacgcgtccgaccacgcgtccgtgtaattctaagctatgggtattgtttgtaatgcttccccatttgtgttgattttgaatctattcctcttaaaagccactgccaaaagcaaaggcaaacaaatggtggttgtgtgaacaccaactttattttgggaccaatgcgtgccaatcctttcaaaccaaaattgtccttttcaccaaaggctctagtgttaaaaaaaaaaaaaaggaaaaaaaaacaataac

SEQ ID NO: 51570 - DNA, 341 bp, Glycine max
  Clone ID: LIB3167-013-P1-K1-C9
atactcctctcttgtctgtgctatcaaaacaacaacattcattcatactgatcacttccttgcctattgcacattcttcatcacttcattcaacatttctctctcccttagctagtttttaccaatggctgctgcggttagtgctgcagtctcttttccatccaccaagtctacctctctcccaagcaggacctccatcattaccccagagagagttgtattcaagaaggcttcattgcaatacagagatgtttgtagcagtggaagggtagtttccatcagagctcaagtcaccactgaagctccagccaaggttgaaaaagagtcccagaaacaggatg

SEQ ID NO: 51571 - DNA, 404 bp, Glycine max
  Clone ID: LIB3167-013-P1-K1-D1
cccacgcgtccgtgcttctcaagtctttcgaagcctctttctctctcttctagaagctatctgtgtttggtgttactaagtctccaacaagcaaagtacatggttgatttggaaatccaggtccccaccccattcgacccgtttgccgaggcgagagaatcggatgcccccggagcaaaggagtatgtgcatattcgaattcagcagaggaatgggaagaagagtctgaccacagtgcaagggctgaagaaggagttcagctacgagaagatcctcaaggacctcaagaaggagttctgctgcaacggaaccgtggtgcaggacaaggagcttggcaagatcatccaactccaaggcgaccagcgtaagaacgtctcccacttcctcgttcaggctggccttgt

SEQ ID NO: 51572 - DNA, 307 bp, Glycine max
  Clone ID: LIB3167-013-P1-K1-D2
cggatggtaatccaagcaccaaaacatagagtatagtttgtcctgattgtgaaggaaatggtgcaatattatgcactcaatgcaaaggtactggagttaattctgtagatcacttcaacggacaatttaaagctggtggattatgttggctatgcaggggaaaaagggacatattgtgtggaagttgtaatggcgctggctttattggtggattcatgagcacatttgatgattagaaaaatagcccagattggatattttaagaattgttaatcgttacagctaaaaaaaaaaaaaaagggcgggc

SEQ ID NO: 51573 - DNA, 300 bp, Glycine max
  Clone ID: LIB3167-013-P1-K1-D3
cccacgcttacgaagactgctagaaactgagtaattcaattgtcggaactggataagtgagcaacttcattggagggggcaaggggatgccaagcatacgatatctaacctctaggactgatcactgactgtagtgaccgaactactgacgtgaaaatcgcacattggtggcttgctacgaaagcacaccgcatcatatgcgacgataccattacagacgagtgcatcgtactaccaatggattccatgcgtggcgaactagatagatcagactccagaccagtcaaccaactaatttac

SEQ ID NO: 51574 - DNA, 394 bp, Glycine max
  unsure at all n locations
  Clone ID: LIB3167-013-P1-K1-D7
cggacgcgtgggcggacgcgtgggctaggagacacaccttcagcagcagcagccatggttctcaaaaccgaactatgccgattcagcggtgccaagatctacccagggaaaggcatcagatttgttcgtggtgattctcaggttttcctgtttgctaactcgaaatgtaagaggtatttccacaacaggttgaagccatcaaagctcacctggactgcaatgtacagaaagcaacacaagaaggacattgctcaagaagctgtgaagaaaagaagacgtgctgccaaaaagccttactccaggtccattgtcggtgccactttggaagttatccagaaaaagagagctgagaagccagaagttcgagatgcanatagggaagctgcccttcgtg

SEQ ID NO: 51575 - DNA, 394 bp, Glycine max
  Clone ID: LIB3167-013-P1-K1-D8
cttgtatacagttttggtctgtgattttgttgcttaggtgagagtggatatggaagaacggtacgagactttgaaggagcttggttcagggaacttcggagtggcaaggttggccaaagacaaggagacaggagaacttgttgctatcaaatacatagaaaggggaaaaaagattgatgcaaatgttcaacgggagatagttaatcatcgatctttaaggcatccaaatattatcaggttcaaagaggtatttctgacccctactcatttagctatcgtgctagagtatgctgctggtggtgaactcttcgagaggatatgcaatgctggtcgattgagtgaagatgaagcaagatttttctttcaacaactaatatctggagttagctattgt

SEQ ID NO: 51576 - DNA, 346 bp, Glycine max
  Clone ID: LIB3167-013-P1-K1-D9
cccacgcgtccgcccacgcgtccgcccacgcgtccgattctctctgtgtatttccctacctctcccttcaagatgcagatcttcgtcaagaccctcaccggcaagaccatcacccttgaggtggaaagctctgacaccatcgacaacgtcaaggccaagatccaggacaaggaaggaatccccccggaccagcaacgtctcattttcgccggaaagcaacttgaggacggccgtacccttgctgactacaacattcagaaggagagtactcttcacctcgtcctccgtctccgtggtggcatgcagatcttcgttaagacactcaccggcaagaccataaccctag

SEQ ID NO: 51577 - DNA, 367 bp, Glycine max
  Clone ID: LIB3167-013-P1-K1-E1
taatatttgtcatttctgccgcatgataattccgcccgcagcgaaagcgttcgctctgctgatccaatcggcctcagcagacgacgtcgttgtgctctctgaagataacttcaacaagggcgtccgctatgacagatccagctctacttgcgctctatgctccttggtgaggacactgtagagagcctgctacacaatatgatgagcttggtttcacatccaagaaacccgaatatcctttacttggccaggcttactgtgatgagcataaaacctcgtgcagcaagtttggagtctctggatacgccacaatccaatggtccttcaaaagaatctctcaacctcaaaggtatgaagggcccccccc

SEQ ID NO: 51578 - DNA, 372 bp, Glycine max
  unsure at all n locations
  Clone ID: LIB3167-013-P1-K1-E7
gctagattgaggttggctgcaaatgagaaggctgaagcagaaaaaatactgcagatcaaaaaagctgagggagaagcagaatccaaatatctgtcaggactcggtatcgctcgccaacgtcaagccattgtggatggactgagggacagtgtgcttgctttctctgagaacgtgcctgggacaacagctaaagatgtcatggacatggtgctggtgactcaatactttgacaccatgaaagagattggagcatcttcaaagtcctcatctgttttcataccacatggtcctggcgcagttaatgacattgccatgcagattcgggatggtctgcttcaggccaccacttcacagaattaagctntgctggag

SEQ ID NO: 51579 - DNA, 392 bp, Glycine max
  Clone ID: LIB3167-013-P1-K1-E8
cccacgcgtccggctacctgctgcaggatgatgatggacaaatagttgagcctcactcaattagtgcaggcttggactaccctggtgtgggtccggaacatagctttttgaaagatttagggcgtgctgaatatcatagcatcacagatgaagaagcattggaagcttttaagagagtttcgcgacttgaaggcataattccagctctggaaacatctcatgcgttggcatatctagagaaagtgtgtccaacccttcctaatggagccaaggttgtggttaacttcagtggccggggtgataaggatgttcaaactgctatcaagtgcttgaagctttgaaagggttgtcatgaacttgtgtggagctgtggattggctgctgactgagct

SEQ ID NO: 51580 - DNA, 383 bp, Glycine max
  Clone ID: LIB3167-013-P1-K1-E9
attgaaattctttagttgtaactgacaaagttttctgagaaaataaggattattattgagagaatggctggctcatcggaagagggacaagtcattagctgccacaccgttgaagaatggaacgatcaactccagaagggcaacgaatccaagaaactcattgttgtggattttactgcttcttggtgtggaccatgccgtttcattgcaccattcttggctgagctggctaagaagttcacaagtgtcatattcctaaaggtggatgtggacgaattaaagagtgtttctcaagattgggctattgaggctatgcccacttttgtgtttgtgaaagagggaacgcttctggacaaagtggtgggagcaaagaatgatgagct

SEQ ID NO: 51581 - DNA, 269 bp, Glycine max
  unsure at all n locations
  Clone ID: LIB3167-013-P1-K1-F1
tggagaagtatcaaatctggagcaggagaatagcgttggcagcgtttgcgtttgctctgctgttccaatcggcctcagcagacgacgtcgttgtgctctctgaagataacttcgagaaggaagttggtcaggacagaggagctctcgttgagttctatgctccttggtgtggacactgcaaaaagctngctccagaatatgaaaagcttggtagcagcttcaagaaagccaaatctgttttaattggcaaggttgactgtgatgagcat

SEQ ID NO: 51582 - DNA, 270 bp, Glycine max
  Clone ID: LIB3167-013-P1-K1-F2
aaatgattgagcctgctgtgaaaggatcatctaatgtacgagaaactagacatggagctccggagcgacgacaagtctttgtctcacaaaaagctgctatttggaatggccccattttggctacagataaagtgattgatgagtgctattggtctgataaagattactgcaccacaactcataactgggactgtttttccacgacagaggcgctggagcaggccttggactttgccacatgaactggcctcgatgtgtgacgcatttgcc

SEQ ID NO: 51583 - DNA, 338 bp, Glycine max
  Clone ID: LIB3167-013-P1-K1-F3
cccacgcgtccggacgaaaccctaggttttagtgagtggcgaaaatggcggtgattttttcaagtgcaataccaggaggggcagcaccagcagcaatcgagcaagtgcagtgcttcgggcggaagaagacggcggtggcagtgacctactgcaagcgcggccgaggcctcattaagatcaacggctgcccgatcgagctggtggagccggagatcctccgcttcaaggccttcgagccaatcctcctcctcggtcgccaccgcttcgccggcgtggacatgcgcatccgcgtgaagggcggcggtcacacctccagatatacgccatcaggcagagca

SEQ ID NO: 51584 - DNA, 308 bp, Glycine max
  Clone ID: LIB3167-013-P1-K1-F7
ctcaatgcattgacatcttataattttaccactaattcagccttcacttatccaatggatatcaagcaccttgttgatcatgaaattaagacggaattggagctcacaaatgagtccacttcacaacttagtgccactgaataagttctggttatcatgtagtcgttcatatggagttgaaataattgtgagttgaatatgtattaagtaatggcctgccactgaattgaacgacaaagtgcaatgaatcaagtgaataaattggctatcctggctcgaatatgagccactttgtattgaatcctttg

SEQ ID NO: 51585 - DNA, 309 bp, Glycine max
  Clone ID: LIB3167-013-P1-K1-F8
cccacgcgtccgtctgtctccgccttggccaaatccctagcctcttgttgtttgattgagatgacgatggcgttgttagcgggtcagagctccatttccgcgcttccctttgttaacccaacttccttgagcttcaaacctctcgcctttaccaaatccctagctctgccttcagcacagaggccaacttcgctgaggctgaaatgcaagatggagagcgacggcgacattctgcgggggagcactcgcacggtgacgacgctgatgggactcgccgagttgctgatgaagaaagcggccattccagtg

SEQ ID NO: 51586 - DNA, 363 bp, Glycine max
  Clone ID: LIB3167-013-P1-K1-F9
cccacgcgtccgacttgggggtctcaaaagtaatcagggctgatcagaaaagattcttctttgatcttgggagcaataataggggtcatttcttaagaatatctgaggttgcgggttctgatagatcctccatcattcttcccctgtcagggcttaagcagtttcatgagattgttggtcactttgtggaaatcacaaaggaccgaattgagggaatgacagttgctaatgttcgcacagttgatccccctcaaagatgaatgctaacttggggtattcatggttaataattaatcccccttccaaggtttcaatgggataagaatgggtgttggctttgagtctgatttgtgtattttattt

SEQ ID NO: 51587 - DNA, 345 bp, Glycine max
  Clone ID: LIB3167-013-P1-K1-G1
agagagagggtgtcagtgatgcccttttgcttgatccctcatttgtcaagataataagaagagggtacataacttggtggtgatttgatacacaagaagaatgttgggtcgggctgcattttcccgaactgggagtttcaggcctgagaatttaggtcagaatgccatggccatgattgggaacgtttgcttctcattttttgtttttggggttttggttttcaccattatggctgccacttatgaacctgaggatccctttgtttcacccttcaaccaagatcaccacattcctcacttccaaatccaatgccactttcaagtctgataacagtgttgtgagaa

SEQ ID NO: 51588 - DNA, 203 bp, Glycine max
  Clone ID: LIB3167-013-P1-K1-G7
taccgtccgattcccggtcgacccacctccgccttgatacataaaacattggctactatagacagaaagccaaggctggtttttacgattagacaacattcccacccctcttatcatcatgtctacattacgactattcactcatacttatattctcctcacggtggagacaccaagagggccctagataataactccttttc

SEQ ID NO: 51589 - DNA, 376 bp, Glycine max
  Clone ID: LIB3167-015-P1-K1-A1
gttgtgtcatggcattaactgccactacttcaatcaacataagtcaccatagcactttgatttttcctccgaaacaacacaagcagcaccttagaatccacaggtttcgatgcagtggaactaatccgaacaaagagtcggaatcacagaacaatgcaattctcaagcttgcatggtatagttccgagcttcttggcattgcagcgtccgttttccgttcaccatctaatgaggaagttcctcctcagaggcttcttcagaccattgatcgtgctgcggttgtggacactatcaaacaagactttgaaagatcctattttgtcacaggagatctgacattaaatgcttatgaagaggattgtgaatttgcagaccc

SEQ ID NO: 51590 - DNA, 218 bp, Glycine max
  unsure at all n locations
  Clone ID: LIB3167-015-P1-K1-A10
ccaggtctnaatggccttgaactatctgcagcaaggttggaccttggtcctagtggtgttatcccactccacactcatcccggtgccaatgaactactcattgtgctttaaggtcacatccttgctggattcatatcttcaggtaacatattttattacaaggcgcttaaaaaggcatagctcatggttattccacaaggtctgttgcactttcaaat

SEQ ID NO: 51591 - DNA, 381 bp, Glycine max
  Clone ID: LIB3167-015-P1-K1-A11
cccacgcgtccgcgaagcctgaagaattttatagtgccaacctacgaattggtatatagattcttgcaatctgataagaacactgttgcttgtatgtttgctaattcatctgtctttggtagcggctatcttgtggcacacaacgtcagtgtgatgcttaagaatggattgagtgaatcaaacattgcaagattgcttcggtaccgtagtaaggcggtgttccgtgcaacggatattcttaaagtggtgagggaagtaaaggatttgggatttgatccttcaaaagttgcttttgttatggcattgctagccattaaaacgttacgatcaaaacttgtggaaggagaaagttgacgttttcaagaaatggtgttggtctga

SEQ ID NO: 51592 - DNA, 386 bp, Glycine max
  Clone ID: LIB3167-015-P1-K1-A2
ggcacccaaggacaggtgcctaaactcaaccctatgactcttacgctgtaatactcattgcgcttactcgctcaccctgtagggttttttggaatcagaaaacggaatagggttttagcggaacgatcatggcaccagctagggttttcggggcaatcgccggcagagcgttcatggcggcggcggcgaaaagcgcggcgaataagaaacccggtccgtccagcggagccgctgcgaaagccgctgtgaagaacactgacgcgcccaggaccaccaacttcggcatacagaaggtggttacggtgtcttccgagctcggagactacctaggcgctcctcaagtgatccgaaccgaagccgtcaagaaagtctgggcctacatcaag

SEQ ID NO: 51593 - DNA, 384 bp, Glycine max
  Clone ID: LIB3167-015-P1-K1-A4
agaaatttgaacccaatgatcaaataatcccaccatccaaaatgctctccatctttctcaatctcttagtgttctctctttccttccaaggaagcaattctattagtcccttatttcgtttctgttttaaccgcgaaaattacactgatcctagcccttatgctaccaacttaaaccagttgtttgacctgctacacaccaaagtgcctcctactggttatggatatggttccattggccaaggcatggaccaagtgaacggtctagccttgtgtcgcggtgacgtcaacgccacaaactgcatggcttgtgtcaatgaagcaaccaaaaagcttcaagagaggtgctcaaagaagaagggggcaatagtatggtacgattact

SEQ ID NO: 51594 - DNA, 388 bp, Glycine max
  Clone ID: LIB3167-015-P1-K1-A5
cccacgcgtccgcccacgcgtccgagagaagcaaggagaaagagaagggttagaaggcgaagaagcatggcttcactcaagaagaagaaaccctattacccgcttccgttaattcctatctattactacttcttattcaaagggtgatatgatcttcttcttccaagcgtctcatgcatgctactttcttctctcttctcggggaattgaagcgttgtggtccgatagtttgctagatcaagcaaattaacctgtatactggtttatatatcttcaccttgcacctttctctctctctctctctctatctctctctctctctatatatatatgggtttaatctcttactttctttatcttttcaccttttttcagttatggtttgatt

SEQ ID NO: 51595 - DNA, 387 bp, Glycine max
  Clone ID: LIB3167-015-P1-K1-A6
accgtgttgaacctcaggtccgaagtagagtgaaacaagatctatttcaagcaaagaaggaagctcctcttgttgtagctaaattcttactcggattcgttctcacaatccagtttgtaccatcaaaatccgattttcaagtgcttatctataccaagataacatcgaaatggagtgtgcaataaaacaagatgttactgaactaattggaaacactccaatggtgtatctgaacaaagttgtggaaggttgtgtggcccgcattgctgccaagttggaatcaatggaaccctgctcaagtgtcaaagacaggttagcattaagtatgatcaaggatgctgaggacaagggactgattacaccaggaaagactgtgcttgttgagac

SEQ ID NO: 51596 - DNA, 322 bp, Glycine max
  Clone ID: LIB3167-015-P1-K1-A7
cccacgcgtccgacagaaacaaaagtgcaagaattaggtggcatcaccgatgtgcatggagctgccaacagcgtcgagatcaacaatctcgctcgctttgctgtagaggaacaaaacaaaagagagaattcagttctggagtttgtgagggtgattagtgcaaagcagcaagtggttgctggagcgaattactacataacattggaagcaaaagatggcttgattaaaaatgagtactgaagcgaaggtttgggagagggaatggctgaactccaaagaggtgattgaataccagccagtcaatggatctagcacacctata

SEQ ID NO: 51597 - DNA, 295 bp, Glycine max
  Clone ID: LIB3167-015-P1-K1-A8
aggagccttatcaaatatgttcatcaggatgtatttgttgcgccaagcgcctccgtcattggagacgttcaacttggaagaggatcatccatttggtatggagttgtcttgagaggtgatgttaacatcatcagagttggaaatggaactaacattcaggacaactctctggtgcatgttgcaaagtcaaatttaagtgggaaggtgttgcctacaattattggggataatgttactgtctgccacagtgctgttatccatggttgtactgctgaggactaggcttatgttggca

SEQ ID NO: 51598 - DNA, 376 bp, Glycine max
  Clone ID: LIB3167-015-P1-K1-A9
cccacgcgtccgaaaactcggaagctgcatggctgcgttcgttccttggtgttggtggaatctctctctctgactatgctgtgtctctttcccaggaccgcgcgaaacacgtaaatccccttcaaacacaacacaaaaacgcagtgtttccaccatctctatctctatctctatatataccctcacaaccaaacatccccattccctctctaaccctatctaatctgtcttctcttacattccattctccaccacacattcaattttaaacctctgggcgtggctagcttcaacctttaacattaacatggccattccctacccccattttatcgccaccgataaagtcgccatggacgccggtctccttcacccc

SEQ ID NO: 51599 - DNA, 122 bp, Glycine max
  Clone ID: LIB3167-015-P1-K1-B1
aaaaaaaaaaaaaaaaaaaaaaaaaataaaaaaaaaaaaaaaaaaaaaaaaaaaaaaaaaaaaaaaaaaaaaaaaaaaaaaaaaaaaaaaaaaaaaaaaaaaaaaaaaaaaaaaaaaaaaaa

SEQ ID NO: 51600 - DNA, 385 bp, Glycine max
  Clone ID: LIB3167-015-P1-K1-B10
ctctttggcgctgtcgccgttcttagccctagtctctctgtctctcgtcgcctctctgcaagttagctgggacaagccaccaaggaaaacattttactgtgaagaacaatgaggaagcttaagtttcatgaaaagaagcttttgaagaaggttaattttttggaatggaagagggaagggggtcacagagagaacctcattatgcaacgctaccatgttactggacgggacgattacaaaaaatattcaggtttatgccatatggttcagaagttagtaaacatattgaaacagatggacccaaaggatccctttcgggttgatatgactgataagcttttggagaaactctacaacatgggtgtgattccaaccaggcaaagca

SEQ ID NO: 51601 - DNA, 381 bp, Glycine max
  Clone ID: LIB3167-015-P1-K1-B11
gaaaaaatgggttcttcttcttctatgtggacggtgtgtgtgattttggcatcactggcctctgcagcactctgtgccaacccacgcaggccagtggatgtacaatttggccgaaactacgtgcccacatgggcctttgatcacatcaaatatttcaatggtggttctgacattcagcttcatcttgacaagtacactggtactggcttccagtccaaagggtcttacttgtttggtcacttcagcatgtacataaagatggttcctggagattctgctggcacagtcactgctttctatttatcttcccaaaacgcggagcatgatgagatagactttgagttcttggggaacagaacaggacaaccttacattctgcaa

SEQ ID NO: 51602 - DNA, 385 bp, Glycine max
  Clone ID: LIB3167-015-P1-K1-B12
gagaaaccagcataactgaatcgactaaaccgaggcaaaacctacattggttgctccaatatcagtatgcttccaattgcactgcactcgtccaatgaaaattaagctttccaatgaattcgtttggacctgaaaaacaacacctggtttgattgtcaccttgggtcgcacagttattactacccttctcttgtgaattggtgaaatatatgctccaactatggataatatgaagaaagatgaaacccaagatcggaagcaagatgaacttgctgaatcgcttgatggtctattcagtagcgtttccaccatgatcaaatcagagcttcaggggacaaataatcacctagagctgttggagaagatgaatgtaagagtggcagaa

SEQ ID NO: 51603 - DNA, 167 bp, Glycine max
  Clone ID: LIB3167-015-P1-K1-B2
ggcccacatgcattgattagagttttcagtggtcacgccattggaaaacaagtagtttcagttgccaatgaataacacctttctcgtacctttttttcttttatttctttggacactgtgtgaaatttctcaaacaaaaataaaaagtaagcctaggagttcttttt

SEQ ID NO: 51604 - DNA, 338 bp, Glycine max
  Clone ID: LIB3167-015-P1-K1-B3
tcggccacgcgttcgggtttattcgaacattgttgtaggcatatgctgaacatgctttcttggactataccgaaaaaaggagggtgaacctttgacataaaaaaaaaaaaaagaacagaaaaaagaataatattaaaaaaatggggggggcgttttaaaggagccaattttactttcgcggggtggcaagctaaataattttctttaggggtacccaaaataaaattcattgcccggaattttacaactatattaatggggaaaacccgggctttcccaaatttattagcattggggtacatccccctttttccagggggatgattatccaaaaggcc

SEQ ID NO: 51605 - DNA, 384 bp, Glycine max
  Clone ID: LIB3167-015-P1-K1-B4
cgaatcgaaccaccatgaaggcctccgtttccagcaatgccgatttcctcaagaggggactcttcttcctttcgtggccgtcactttctttttcgtggtggtggtggtggttgtgaagatgatgatgggtggctgcggatggtgttttgttattcagatttcttttttattcaaagatagggttgttagggagtaggtattaattgtgatacgggcaaatactgctaagtgtccatgactgtgtcttcttcctttcagaaaattggcatgtaattgattattggacatatgtgtctggctgtcataatgtttatgtttttacgggatgtgtgcagtcactttggacaacatttagttgccatctaatctcgtttaatctaaaaa

SEQ ID NO: 51606 - DNA, 291 bp, Glycine max
  Clone ID: LIB3167-015-P1-K1-B5
catcgatatctatcttgttagtctgtgttgtaccaaataaaaaagacagatatctagtagtcccgtggaatatagcatcctgccactttatgatttaataatttcattcagcacagaattgataacgtgctttttccacaaacaagggaaatgcaaattactatatgtttgcatgctctcttgtctaccgtacggtacacccacacgagatgcaaaccacatgaatgatcagaatgaggtgggcttcttcttgcattctgaaaaatgattaattgaagttgtgtactgtaa

SEQ ID NO: 51607 - DNA, 177 bp, Glycine max
  Clone ID: LIB3167-015-P1-K1-B6
ccacgcgtccccacgcgtcgattcatggctctataaccacattattgttatactacctgggcatcatacaacttggaccatcagttttgttaaaaccgcttgaatacccgagagagtcttgtgtaagcgcacccctatggggaatcaaaggcgctattagctcgttttggtactaac

SEQ ID NO: 51608 - DNA, 297 bp, Glycine max
  Clone ID: LIB3167-015-P1-K1-B7
gccggcgtcgccgccggttctcgtcgacgatcgcaccggcttcgcggaggtgcgcctctacggcgacgtggtgctccgctacgtcagctacaaggacgccgcgccgcaggcgccacacgcagattcgtcgcggtggttcctgccgggattcgaggccgcggcgtcgtcgtcttcgtttccggagctggactacgggatccggcggctggaccacgccgtcgggaacgtttcggagctggcgccggcggtgaggtacctgaaaggcttcagcggatttcacgagttcgcggagtttac

SEQ ID NO: 51609 - DNA, 340 bp, Glycine max
  Clone ID: LIB3167-015-P1-K1-B8
ggtgttaagaattcaccacacctcattactcattgaaatggattgcaccaacttttcacactaatgtaagtgggtgaaataataactatttttaatatatattttttataattattttttaatatttaaatatatatatattatatttattatttattattaatttattttagtatatttgtatacttttatatattatcttatcaaattatttaattaattctcttattatatttttaaatattatcttatattattcttctatattatataattaataatatcttcaatatcttacctattatttatttcatattattttatgatatcattactaata

SEQ ID NO: 51610 - DNA, 383 bp, Glycine max
  Clone ID: LIB3167-015-P1-K1-B9
cccacgcgtccgcccacgcgttcgcacagatctgtcttgaacttctctgtgttctgaaacagcaacaatgacaaaaaccatgactatgtggtttctgttggtctctctttccttcatttatgctgttgccactgctaatactcaaatcaaaattactaacaaccctgcggacaagttggtagctgcaatcaacgaaaacagaactgctcacaaggtatcagccttaaccgacaacccggggcttgcgtgtattgctctacaatacattaaggcataccagggtgaatgtgatgctgtgggaggatctgatggcaagaaacctcctgagtctcactttgctgaagtttttgccccaaactgtggtgttgaggcatcaactcttg

SEQ ID NO: 51611 - DNA, 108 bp, Glycine max
  Clone ID: LIB3167-015-P1-K1-C10
aaatcctcatttttctgagcagccaaccactctctctctgcctttcgaaagtgctcagtttgcaaagaaaatctgattcatgtcgggccaggcgatggtgaccaacac

SEQ ID NO: 51612 - DNA, 376 bp, Glycine max
  Clone ID: LIB3167-015-P1-K1-C11
atctccacgcaactcatttccaatctatccaaatttgcaagctaacatcatgtgtacctccacacttaaatgcttaaatcacattaattccatttcctactactcattatctgtacaaccactgcaacagcttcatcatccctttaagtttcactgttcccctcaaagcattatccacttccatccattcctcactttcttcccctaagccacctatcacaaaggaggatgccatacttcaggccaaaacatccctttcagcaaccttagagaagcccctaaacaataccaaactaataggcaaattcaagaaactaaggcaacccaagttccgggttgaaattccagtcattgatgactcaccggattcactgtc

SEQ ID NO: 51613 - DNA, 383 bp, Glycine max
  Clone ID: LIB3167-015-P1-K1-C12
cccacgcgtccggcggacgccaatatattgttcacccggggcgacatcttactgttcagaggttaaaaggtgctaatgttaatgataagattgccttacacaaggttttactggttggcactgatacatcttgctacattgggaaaccaattgtaacaaatgctgtagtatacgcaacggtggaagagcagggtctagaccctaaagtaattgtcttcaaatataaaaagaagaaacattatcgcagaaacattggacacagacagccaaatacacgtatacggataaatagcattatgggctatgaaaactacccaaaagttactatggacgatatcaaatcagacgaacccgaatcatgaacatcttgtgcactgtgccta

SEQ ID NO: 51614 - DNA, 373 bp, Glycine max
  Clone ID: LIB3167-015-P1-K1-C2
cttgacaaagtctctggctctggcttcaaatcaaagaaagaatacctatttgggaggattgatatgcagctcaagctcgttgctggcaactctgctggcactgtcactgcttactacttgtcatcccaagggccaacacatgatgagattgatttcgagtttttgggaaacctaagtggggacccttatattctccacacaaacatcttcacgcaaggcaaaggtaacagggagcaacagttctatctctggttcgaccccaccagaaacttccacacttattctatcatttggaagccccagcacatcatattcttggttgataacacaccaataagggtattcaagaatgctgaatctcttggtgttcctt

SEQ ID NO: 51615 - DNA, 75 bp, Glycine max
  unsure at all n locations
  Clone ID: LIB3167-015-P1-K1-C3
ctagttctagatccgcgagcggccgtccttttttttttttttttttttttttgtgtttttttnnnnnnnttttgg

SEQ ID NO: 51616 - DNA, 103 bp, Glycine max
  Clone ID: LIB3167-015-P1-K1-C4
acagttttgacagggaaaaataagataatggaggggaccttgtagcaacttaagagggaaattttgtgggcaaaggtggtcaataaggtggataaggatggag

SEQ ID NO: 51617 - DNA, 391 bp, Glycine max
  Clone ID: LIB3167-015-P1-K1-C5
cgtccgcccacgcgtccggtgagagaatagtgtaaaagggaaatatggcatttgcaggaacaagtcaaaagtgcatggcttgtgacaaaacagtttatctggttgataagttgacagcagataaccgagtgtaccataaggcttgcttcagatgccaccactgcaaaggaacactcaagcttagcaactataactcttttgagggggttctttactgcaggccacacttcgaccaactgttcaaaagaactggtagtcttgacaaaagcttcgaagggacaccaaaaattgctaaaccagaaaaaaccggggaagagaaacctgcagcaaccaaagtctcaagtatgtttggtggaactagagataaatgtgccggttgtcaaaaacagtg

SEQ ID NO: 51618 - DNA, 232 bp, Glycine max
  Clone ID: LIB3167-015-P1-K1-C6
gagagtatcatccatggcggccacctgatcaataactatagccagcaactccacgatgctctctgcttgcaaagaaaccctttgtgggtggcactgctctttccctcaacaacctcaatttttgtcgtactaggaggtcttacacctgtagagccatctacaatccccaggttgtcgtcaaagaagaaggccaacccgaaaccctcgattatagagatttctttgttgacaa

SEQ ID NO: 51619 - DNA, 80 bp, Glycine max
  unsure at all n locations
  Clone ID: LIB3167-015-P1-K1-C7
tccacgcgttcgaaaaaaatataaatantaaaaaaaaaaaaaaaaaaaaagggaggataataaaaaaaaggggagataat

SEQ ID NO: 51620 - DNA, 180 bp, Glycine max
  Clone ID: LIB3167-015-P1-K1-C8
gaattcccggcgacccactcgatttttcctatgcttattggagcctcaaataacaaaacgtgtgtggcagacacatgatgattgatgactacgataacaataatgataaaaccaagatgttgaaggaaagctgtggaggaccggtaaagagtggtgcaaagtatattattaaaggacaaa

SEQ ID NO: 51621 - DNA, 381 bp, Glycine max
  Clone ID: LIB3167-015-P1-K1-D1
gttctagatcgcgaccggccaacttagggtggcctcactctcgatctcaccgatcaccaaccaacgtggcttcttctcctcaggttctctaagtcaactttcagtttttgattgttgaggatggtgctggttttggccctgggggatttgcacataccccacagggctcctgatcttcctgctaagttcaaatccatgcttgtccctggcaagatccagcacataatttgtactggaaatttatgtattaaagaaattcatgactacttaaagactctttgtccagacttgcatataactcgtggtgagtatgatgaagagacaaaatatccggagaccaaaacactaaccattggccaatttaagctgggactatgccat

SEQ ID NO: 51622 - DNA, 377 bp, Glycine max
  Clone ID: LIB3167-015-P1-K1-D10
cccacgcgtccggttcgaatattggaatcaaagcaaagcaggagaagatggaaaacagtgaggagcaacaaaagtacagagtccggaaattggagatctcggacaagggcaaaggcttcatcgagttactgcaacaactcagcgtttgcgattccgtctccgacaaggaattcgaggatcgatttcgagacctggatgttctcggcgatgaccacgtgatcggcgtgatcgaagacgaggcttccggaaagatcattgcgaccgggagcgtgtttatcgagaagaagtttttgagaaattgcggcaaagttgggcatattgaggatgttgttgtggattttagcattcgcgggaagcatttgggaaagagaatcatt

SEQ ID NO: 51623 - DNA, 360 bp, Glycine max
  Clone ID: LIB3167-015-P1-K1-D11
gagagtgatttcagtgagtgatcggtgttcacttgatctcatcataatcgtcagcgtcaattgaagaagatgccgatcagaaacatcgccgtcggaaggcctgaagaggcgactcaccccgacacgttgaaggcggctttggctgagttcatctcaaccttcatcttcgtgttcgccggctcaggctccggcatcgcctacaacaagttctacccggccgatgacgtgaagaagcccctcgtcaacaagcacaagcccaagcccgcgaaactcagggctagcattactccagggactgttctgatcctgcttgctgggaggttcaagggaaagagggttgttttcttgaagtagcttcca

SEQ ID NO: 51624 - DNA, 381 bp, Glycine max
  Clone ID: LIB3167-015-P1-K1-D12
gcagaaatttgcgccatcgtcgagagaagcgtgagagacttctcgtttatgatgagagctaagatagtttagttgtcaagtcataaatcagtatcatcactttaaatttcattagaagctgtcaaaatgtcacggaagggtttgatggagcaagacctgagtaagttggatgtaacaaagttgcatccactttctccagaagtcatatctcggcaggctactattaatatcggcactataggtcacgtggcccatggcaagtcaacagttgtgaaagcaatatcaggtgtccagactgtgcgtttcaaaaatgagttggagcgtaacattacaatcaagcttggctatgcaaatgcaaaaatatacaagtgtgaagatgaa

SEQ ID NO: 51625 - DNA, 372 bp, Glycine max
  Clone ID: LIB3167-015-P1-K1-D3
aaacaactctctcggaggtcctattccagctgccattggtgaattgaaaacatgttcaagtcttgatttgagctataataagctgaatggaagcataccttgggaaataggaagagctgtgtccttgaaagaactggtattggaaaagaacttcctaaatgggaaaattccatcgtcaattgagaactgctctttgctaacaactttgattctgtcccagaacaagctgagtggtccaatacctgcagcagttgcaaaacttactaacctgcgaactgtggatgtatcgtttaacagtctcactggaaaccttcctaagtaattggccaatcttgtcaatctttttaccttcaatatatcttacaacaacct

SEQ ID NO: 51626 - DNA, 383 bp, Glycine max
  Clone ID: LIB3167-015-P1-K1-D4
gtggtctgcaactatgagcaaggattatctaatcatactttctctccttctttccacggtgcttgcaactgcaagttcttcttcttcttcttcctccctctatcttgggaagggcttctcccatcgcaaattgtctcccagttatcacattcacaaaaccattgacgaatcctatgcagttatcttcgatgctggtagcacgggaagccgtgtacatgtctatcgttttaaccaacaattagatctccttcgcattggccaagaccttgagttgtttgtcaagactatgccaggtttaagtgcttacgctgagaatccacaagatgctgcagaatctcttattccacttttggaggaagcagaagctgctgttcctcaagagt

SEQ ID NO: 51627 - DNA, 382 bp, Glycine max
  Clone ID: LIB3167-015-P1-K1-D5
cccacgcgtccgcccacgcgtccgtctcacgcgtccgcccacgcgtccgcccacgcgtccggttgagtagttcttcatcatagtcttaaacattaaaccttagcaaaactcaacaatgctagacatcaaaggctacctcgtactcttcttcctatggttcatatcaaccattctgatacgttccatcttcaagaaaccacagcgtctaagactcccaccgggtcctccaatttcaatacccttgctgggacacgcgccatatctccgttcactgctccaccaagcattgtacaagctatcactgcgctatggacccttgatccacgtcatgatcggttcgaagcacgtggtggtggcgtcgtcggcggagacggccaagcag

SEQ ID NO: 51628 - DNA, 382 bp, Glycine max
  Clone ID: LIB3167-015-P1-K1-D6
cccacgcgtccgttttttctcaacataatggggttcaattctagctagttctattacgtcgtccgcgaccatgaacatggcgatcgcgcttctgttcatggttttcgcagtttcatcagctttagacatgtcaataatatcacacgacaacgctcatgcggatagggccacgaggcgcaccgacgaggaggtgatgtcaatgttcgaggagtggctggtgaaacacgacaaggtgtacaacgcgctcggtgagaaggagaagaggtttcaaatcttcaagcacaatctgcgcattatcgatgaacgaaactctctgaaccgaacctacaagttgggactcaacgtgttcgctgatctcaccaatgcggagttcagagccatg

SEQ ID NO: 51629 - DNA, 353 bp, Glycine max
  Clone ID: LIB3167-015-P1-K1-D7
gtttgttgtgagctataagctagtttatcgtgaggagaatatgaagttgtttgttttctttgttgctgcagtagatatggtagcatggccatgccatggcgcaggctaccaaaggttccctctccgaatgaaaactggctatggtgagcgttcttcggaggtaaaatgcgcaagttttaggcttgctgtggaagcacacaacatccgagcctttaaaaccattcctgacgagtgcgttgaaccaacaaaggactacattaatggcgaacaatttagatcagactctaaaacagttaaccaacatgctttcttttatgctagtgaacgcgaagtccattacatcgacatattta

SEQ ID NO: 51630 - DNA, 183 bp, Glycine max
  Clone ID: LIB3167-015-P1-K1-D8
cccacgcgttcggccacgcgttcgataagatccaaccaaaggttctttcggtattccattcaaccgattccatgggggcaaaaggcttcccgcaattgccggcggggcccgtgcccccctttgacttgacggaatcctccacctggggggggaccataaaccgttccccgttttggcaggacc

SEQ ID NO: 51631 - DNA, 291 bp, Glycine max
  Clone ID: LIB3167-015-P1-K1-D9
cccacgcgtccgagaaaatgcaatctgggtgacgtctttaacagaagttttgatggggtggagaggtggtaatgagagtgtgatatgcaatgagatgctgtactttttagtttattcaactgggggtggtcaatcagaaaaccgtcatgccctagttgcgtataacatgtccaatcattcattccaaggtagtttaacaaggaacttcattccggtaccttgttctctaacatgtggccgtttgatgaatcttaaggagaatctcgttatggtgggaggaatttggttaac

SEQ ID NO: 51632 - DNA, 217 bp, Glycine max
  Clone ID: LIB3167-015-P1-K1-E1
aacaaataaactggcctccatactggtctttacatccgcacctagtatctagcttcaatttataatcataaaccatattctgattcccgaacctaacgaatattcatttgctggcctaggacacagccatgacggttatcaggaaggagatgctactggtgatcacgcatgcgaagctccatgactaaacaaaggcggaggcttgtcgtgcctgtta

SEQ ID NO: 51633 - DNA, 384 bp, Glycine max
  Clone ID: LIB3167-015-P1-K1-E10
gcttctttctgcgtttcgtgctcaagctcaatctcatgctccagctcccactttcaagtactgtgaaaagaatgcagactatgctgtgaaggtgagtggagtggaaatattgcctgaccccgtggagagaggagtgccattcacctttaagatcccagcttatactcctgaaccaattcaaagcggggacttgttatatgaaatttcttatgctggaatagaagcacaacctgctacatttctccatgatctctgtgaggaagcaccatgcccagtacctgcaggcaactttgtgctcgttcacaccgaattattgcctccggttaccccaccagttagtttccacttcccactttaccaaatatattcacagttctgtggcta

SEQ ID NO: 51634 - DNA, 377 bp, Glycine max
  Clone ID: LIB3167-015-P1-K1-E11
gttgttgtggtgtttcatttgtgaaactaacaacaacacaaggccatcatcatggcagctgcttccccaatggcaagccaactcaagtccaccttcactaggactcttgtagctcccaagggcctctctgcctcttcaccacttcacctcgtgccttctagaaggcaatttagcttcactgttaaggccatccaatcagagaagccaacctatcaagtgattcagccaatcaacggtgacccattcattggaagcctggaaaccccagttacatccagccctttgatcgcatggtacttgtccaacctgcccgcatacagaaccgcagtgagcccactactaagagggatcgaggtgggcctggcccacggatacct

SEQ ID NO: 51635 - DNA, 385 bp, Glycine max
  Clone ID: LIB3167-015-P1-K1-E12
aaacactatagcaatagaaacatttgcttttgaaaaacccctcactcttcatcactacactagctagccacatacaatgtcgaccaaatttaaggtgtttcgtgaattcacaagcgatgactcattcctaaaccaagttatccctgaaaacatcaccgaattccaagtgactctgtccctcgctagagactacgatggcaacaactcaaccaacggaaagttcattccttactgggacactgaaaaggtcactcccgaagtgataaaaaaattcaagaaaaaatacgaacccaccgcactgagggttaaggttcttgtcagcattggaaacaaaaacaaacaatttcctttcaccattggctcggactcgaacagcgaagcatgg

SEQ ID NO: 51636 - DNA, 381 bp, Glycine max
  Clone ID: LIB3167-015-P1-K1-E3
cccacgcgtccgtttcctcttctctctctctttctctctttctagttcgtgttcttcgtcgcaaatccgaagtaggatctctcttgttttttctctaggtttttcgcgatggcgtcgaagcgaattttgaaggagcttaaggatttgcagaaggatcctccaacatcttgcagtgccggtcctgttcatgaagatatgtttcattggcaagctacaattatgggtcctccagacagtccctatgctggaggtgttttcctagtgactattcatttccctccagattatccctttaagccacccaaggttgcattcaggacgaaagtgttccacccaaatataaatagcaatggaagcatttgccttgatatattgaatgag

SEQ ID NO: 51637 - DNA, 386 bp, Glycine max
  Clone ID: LIB3167-015-P1-K1-E4
ccacttacaaagtagtactacttggtttcaatcaaaacaaaaactcacactttggtggccacagcaacaataacaatggcagcctcactacaagctgcagctaccttcatgcaacccaccaaggtgggcatggccactcgcaacctcaaatctacacaatgcatttctaaggcttttggcttggaacccgctgcagctaaactcatttgctcccttaagcccgatctcaaagattttgctcaaaaatgtgtcgacgccaccaaaattgcaggattcgcccttgccacctcagctctcgttgtttctggagcgagtgcagaaggtgttccaaagaggctaaccttcgacgaaatccagagcaagacatacttggaagtgaagggaac

SEQ ID NO: 51638 - DNA, 147 bp, Glycine max
  Clone ID: LIB3167-015-P1-K1-E5
ctagttctagatcgcgagcggctgcccttttttattttttatttttatttatggggggactcttacaaagtgggggggtcaaaataaacacactctaaaataataattattacgaccaatctacaatttataaatcattacttcact

SEQ ID NO: 51639 - DNA, 373 bp, Glycine max
  Clone ID: LIB3167-015-P1-K1-E6
cccacgcgtccgctctgcactcaccactgtcacacttcaatcgcactaatggctgtcaccttctcagatctacacaccgaagagggcatcaaatccctcgatcaattcctttctgggaaaacctatatttctggggatcagttgacaaaggatgatattaaagtgtatgcagctgttgttgaaaagccaggggacacttttcctaatgctgccaagtggtacgatgctgtctcttctcaacttgctccaagctttcctggccacgctcaaggggtaagattcaatggcgctgctgctccagatgtagctgcacttgtcaaagttgctgccactgtcttagaagatgattatgatcttgatctctttggagatt

SEQ ID NO: 51640 - DNA, 384 bp, Glycine max
  Clone ID: LIB3167-015-P1-K1-E8
atttccagcatgtgctgaattttcatgttctgaaccatctcctcaagcacgaacaatactgcactgcctactccgccatcttcttcagagggacaaaattgaggaagctttaaggctggcagagctatcagctgagaagcctcatttttcacattgtctagagtggcttctttttacagtatttgaagcagatatatccaggccaaatgtgaacaagaaccagatctcagttgttgaacatgctaaaaggtctcttttagagaagacctgtgacctgatcaggaattttccggagtaccttgatgttgttgtaagtgttgcaagaaaaactgatggtcgtcattgggcagatttgttcactgctgctggaagatcaaacagaat

SEQ ID NO: 51641 - DNA, 386 bp, Glycine max
  Clone ID: LIB3167-015-P1-K1-E9
cccacgcgtccgcccacgcgtccgatcggcaacagaggcgagaagatgaagttcaatccacgagtgtcgagcagccgccgcaagagccgaaaggctcacttcacggcgccgtcgagcgtgcggagggtgttgatgagcgcccctctgtcggcggagctccggtcgaagtacaacgtgcggtcgatcccagtccgcaaggaggacgaggtgcaggtggtgcgcggaacatacaagggtcgcgaggggaaggtgacgcaggtgtaccgtcgcaagtgggtcatccacatcgagcgcataacccgcgagaaggtgaatggctccaccgtcaacgttgggattcaccccttcaaggtggttgtcacaaagctcaaattggacaaggatcg

SEQ ID NO: 51642 - DNA, 228 bp, Glycine max
  Clone ID: LIB3167-015-P1-K1-F1
agaaaacgtgggttgtgcagctctgaaccacttttttgaacggacatgctcatggcaccactcttctatactaggagagctcggtggtgactcacacccagtggtccccaccgagtttcatgcctcaaatcaatgcgacgaacacaatgtacgggagagtggagtgctccaccagtgacatgacggtgtcactgcaggtacagcagctagcccctcacgcaaagtaca

SEQ ID NO: 51643 - DNA, 345 bp, Glycine max
  Clone ID: LIB3167-015-P1-K1-F10
cccacgcgtccgaccacgcgggcgtcaacgcgttcgaccactcggacgcaacgtgaatggcagcctgatgcatgctatgcaccctcgtctcctgcctactccctacaaagccacgcaatcttcccatcataacgcgatagccactgcacaagctacttgccaagcatcaagaccaggaccaccactcgtcggtacagctgtacagcgtggtgaacctgtgccacacgcatgcgaacacgctcttttaacggacagcgtacaacgtgcatgtggcggtgcgacgagaactagccataggagaggctactgaacacattcccagaagaggtcatgagagccggagtc

SEQ ID NO: 51644 - DNA, 385 bp, Glycine max
  Clone ID: LIB3167-015-P1-K1-F11
tacaaaggaacccattcctgttttgtcaactgtacattataacatgggcggtattcccacaaaccattatggagaggtggttaccattaaaggtgacaatccagatgcagtggtttctggattgatggctgctggggaaacggcctgtgcatcagtccatggtgccaataggcttggtgcaaattcacttctcgatattgttgtttttggtagagcttgtgcaaatagagttgcagaaatccgtagaccaggagagaaacaaaagcctctagagaaggatgctggtcagagaacaattgcatggctggacaaattgagaaattcaaatggctcattgccaacttcacaaattcggttgaatatgcaacgagtaatgcaaaacaat

SEQ ID NO: 51645 - DNA, 386 bp, Glycine max
  Clone ID: LIB3167-015-P1-K1-F12
attttctagggtgaaggtcactgtggagattctcatgtcacaaccttctcagcaatagattcctcatacaacttaccagataatgttgccataataaccctccaggatctgggtgatggaagagttctcctacggttggcacacttatacgagattgatgaggacaagtatctttcagtgaaggcaactgtagaacttaaaaaggtgtttcccaacaagcagataaacaaaataactgaagtgagcttatcagcaaaccaagaaagagcagaaatggagaggaagagattggtttggcaagttaaagggtcacctccagaacccaaggtgtggaggggaggaccagtagatccagaaaatctaattgtagaacttgctccaatgga

SEQ ID NO: 51646 - DNA, 383 bp, Glycine max
  Clone ID: LIB3167-015-P1-K1-F2
cccacgcgtccgcttgcatagactattgtttaagaaagctattgtcattgatttgctagctccaacaatgggttctagcagattatcattcattttagtacttgtgcttgtaaccttttcatccatgatcattgactcaagggttgcagaggcacgtaccctgccaaaatcagccttattgccttccaaagttgatatacctactgttgttcctcttccactggtggcaccactgccaaatttgcctgttactctccctgcagtgcctgaactacctgcagtacctagagtaccaattcctgaagtaatagttaataacgccaaaataatcccttgagtacctatgatctatccagtcactactacttattttgtcacttgct

SEQ ID NO: 51647 - DNA, 249 bp, Glycine max
  Clone ID: LIB3167-015-P1-K1-F3
cccacgcgtccgatcacaccttatagatctttaatgaaacttgaatattccaaatttcattaatgatctataaggtgtgatacaaaatgtcaaaagaatacaaactaagatatgcttacaaagtacaaacctccggcatttaaatatcaggatacaaacttacatttgcctggaatacacaatcaaaaaacatcttcaaggctggggagagtatacttcaccgattcaaataaaggttctagaacgcga

SEQ ID NO: 51648 - DNA, 205 bp, Glycine max
  Clone ID: LIB3167-015-P1-K1-F4
gtttaccacagagatagatgctgaacaagggaaaggtaatggctgggtacttgagtgtcaataaagacagattttggtagagttacgtttgtaaattagatcatcagtggttaggctaccaagcaatatgattctctgtatgtataattattgtacatatgcaaaaaataaaacaacgcgatctctaattgatagagtgatgatg

SEQ ID NO: 51649 - DNA, 386 bp, Glycine max
  Clone ID: LIB3167-015-P1-K1-F5
gcgattaagaagatgaagagagtggagtttatggggctggggctgttagtggtggtgatgatgggatgttgtgggtctgcgactgctgcggatgacttggcaaccaagtgttcggcggtgattcagaaggtaataccgtgtctgaacttcgcgacggggaaggaagaaatgcccaaaaaggaatgttgcgacgccgccacggccataaaggagagcaaccagagtgcttgtgctacatcattcaagagacccacaagggtagcccacaggtcaaaagcttgggcattcaagaggccaagctgcttcagctcccttctgtttgcaacgtcaaaaacgccagcatcaccaactgtcctaagcttttgggtctatctccaagttccccc

SEQ ID NO: 51650 - DNA, 372 bp, Glycine max
  Clone ID: LIB3167-015-P1-K1-F6
ccaattccaaagttttgctacaaggttttagtgaaaacaaattctcacacttaggtgggcacagcaacaaatacatgtgtcaacataactacaagcagtagatagcttcatgcagctaaccagggcgggcaggatcgctcgtaaccaggcatctacacattgcatacttaaggcttaaggcttggaaccgaatggcaaataaactgatattggtatattaagcccgagctaaaacattttgctcaaaaatgggtcgacgccaccaaaattgcaggattcgcccttgccacctcagctctgggtgtttctggagcgagtgccaaacgtgtttcaaagaggctaaccttctacgaattccatatcaagacatac

SEQ ID NO: 51651 - DNA, 352 bp, Glycine max
  Clone ID: LIB3167-015-P1-K1-F7
aggaaacgaagttgtgctgaatcttggattttctcatcctgttaagatgacaatccctgatggcctcaaagtgaaggtggaggaaaacaccagaatcacagttagtgggtatgacaaatctgaggttggccagtttgctgcttcaattaggaagtggagacccccagaaccatacaaaggaaagggcgtcaaatatgctgatgaaattgtaaggagaaaggaaggaaaagcagggaagaagaagtaatggggggtttcaattttcctttctcatttatctcctgttgtttttcctcatttgttagtaatggaaatattttaaccgagtaaaagaaattcattattcattgag

SEQ ID NO: 51652 - DNA, 343 bp, Glycine max
  Clone ID: LIB3167-015-P1-K1-F8
cccacgcgtccgcccacgcgtccgttcacgcgtccgctaaattgaaggagggaaggtttcctggagagatcgaattgaaggatctgattaccaaaaagatgacacattctataggtgtcaatagtgtgtcagaattggcctcttagtgccattggtggagacatattttgagctgtcataaatgatgtaactgggcctgccattgcactatgaagtaaaggttgatagacagatatcggtaggcatatcatgtaaggtttccagatgtatactggagcatgaaatttctttattgaaagaactaagtaattgctgaaggaaaaactcagttaatagtttgtgt

SEQ ID NO: 51653 - DNA, 383 bp, Glycine max
  Clone ID: LIB3167-015-P1-K1-F9
cccacgcgtccgcttgatgaaataatacaccaaaaacaagatttggaatatgagcttacaaacatgcggatgctggtgtcaaagatgaaaaagtctgggattaatgttgaggacaagtcaactaatgatgtgcaaaccaaggttaaaaatgggcatccaacatctaatggttactctcatagaaaacaatacaaagagggtgaaattttagggagcatggaagatatgattgcattagaagaactgagggctaattatcaaagagaaagaagaagatgcaaagaactagaaagtcatatttctatattgaagggtgaagatattgctggtctggatgttatggcccttgaagaacttcaaaaccttcatattgaggcaataac

SEQ ID NO: 51654 - DNA, 376 bp, Glycine max
  Clone ID: LIB3167-015-P1-K1-G1
agaacccgtggtttctgctgctgatggccactgagatgatggggccaacaatggtggcagaagcaagaacttgtgagtctcatagccaccgcttcaaggggccatgtttgagtgacaccaactgcggctctgagtgccgaaccgaacgtttcactgcaggacactggcgtggcttccgacgcagatgcttctgcaccaaacattgttaattttaaaaaattaattaagagtgctttgattgaagatgatagatctatcatctatctactcgtgttgctaattaaccactttgtgtctgagaatcaggggtacccattctactatggagctacatgtttgactcttattatatctagctagagatctctttatgaaa

SEQ ID NO: 51655 - DNA, 363 bp, Glycine max
  Clone ID: LIB3167-015-P1-K1-G10
cccacgcgtccggcagcctaggcgggagtttctcattgggcacaggtggaggtgacaaatctgctacaagaattgtgaaagttaaacataaaccccgcaagaggtacgacctaacagcacacgaaacaggacctaaagaattatgaaaatggttaccttgcatcgtgctgcaggcgacacttgtggaacaaataaataagcccttaagagtgattgccggatattactgctcgcatgacagtctggacaagggggtgctatgctaatcagcatatgcaagcttgtcgtcagtcttcttttgccttccatattcaatagaatacaaggctgaagtttataccaattttgtattagtatgatatg

SEQ ID NO: 51656 - DNA, 372 bp, Glycine max
  Clone ID: LIB3167-015-P1-K1-G11
cttagttgcttccaattaagatggttctgctagagaagctctgggatgatgttgtggctggccctcaacctgagcgtggccttggcaagctcagaaaactcaccaccctcaaaactattgatgaaggagaaagtagcaagctgcagaagacgttgtcgatgccgtcgacaccaacaaccccgatgactccgacgactccaacgacaccgggatcggcccgtaaagctgacaacgtttggaggagcgtcttccatcctgggagcaactccgccacaaagaccatcggtgctcagatgtttgacaaaccacttcccaacactcccactgtctatgactggctgtacagtggggagaccagagcacgcaccgctg

SEQ ID NO: 51657 - DNA, 389 bp, Glycine max
  Clone ID: LIB3167-015-P1-K1-G3
gacggttatctccaagcctcactccctcgtttcttccgcccccttcactcaccttctatctgccaattctcttctattaataacacccacctctttggttcctcttcccttcaattcatcacataataacgacactacaaaacattgtttttagctctttttttgttgcagcgaaaccaaaatgtctttcactgcaactaagtttgcaccttctcctctccctctcaattccaccacccccagatccaatgacaagcctctctctttctccttcgatcactccaagcccaacccttcttcctctttccttggatccactcgcaagcttcttcgcttcaatgctctcgctaaacctcatgctcacacacgtgcttcttcttcccctgttg

SEQ ID NO: 51658 - DNA, 376 bp, Glycine max
  Clone ID: LIB3167-015-P1-K1-G4
atctgcgtctcctatttcctttttttgttttgttctgttatcaaaatcaaataaaaaatctccttctcggaaatggcgtcgtcaatccaacaacaacgctcgactgcaacaagttctggatctgaaggaggaggagatccgcaaatgatcgacgagaggaagcggaagaggatgctgtcgaaccgcgagtcggcgcggcgatcgcggatgaggaagcagaaacagctggaggatttgaccgatgaagttagcagattgcaaggcgcgaacaagaagctggcggagaacataaaggcaaaggaagaagcatgcgtggagaccgaagccgcgaacagcattctgagggctcagacaatggaactggccgatcgattgc

SEQ ID NO: 51659 - DNA, 389 bp, Glycine max
  Clone ID: LIB3167-015-P1-K1-G5
aaccgaccgcaccaccgttttcctttgctttgcgttctacaatgtcgaaaacctcagagattattacatgcaaagctgctatttgctggggaataggaaaacctgtgactgtggaagagatacaagtagaccctcccaaagccaccgaagttcgagttaagatgctttgtgccagtatatgctccacagacatctctagcacaaaaggattcccacataccaattttcctatagcacttggacacgaaggagttggtattatagagagtgtcggtgatcaagtaacgaatctgaaagaaggggatgtggtaattccaacatacataggggagtgtcaagaatgtgagaattgtgtttcagaaaaaaccaaatttgtgttgacacaccca

SEQ ID NO: 51660 - DNA, 344 bp, Glycine max
  unsure at all n locations
  Clone ID: LIB3167-015-P1-K1-G6
tcgcccacgcgtncgcccacgcgtccggagagaagagagaagagagaagagagaagagagatggatccagacgcgttggcaaaggcattcgtggagcactactacagcaccttcgacaccaaccggaacggtttagcgaatctgtatcaggagggttccatgctgaccttcgaagggcagaagatccagggcgcttccagcatcgtcgctaagctcacttccctccctttccagcagtgccaccactccatctccaccgtcgactgccagacctccggtgtcaacgctggcatgcttgtctttgtcagcggcaaccttcagctcgctggcgaacagcacactct

SEQ ID NO: 51661 - DNA, 385 bp, Glycine max
  Clone ID: LIB3167-015-P1-K1-G7
gaaggaagagcggtgggtgagttacggaggaggcatggctactacggctacggcttctgcgtcgtgggaggaactgacgctgaaagtgaaatggatcggcaacgagtacaccgtcagagtctgcgccgacgacaccgtgggcgaactcaagcgccgaatctgcgagctaaccaacgtcttaccccttcggcaaaagctcttgtaccccaaactcggttccaaactcaacgacgactctctcttcctctcccagctccccctcaactcctctctcaagatgaccatgatcggtactacggaagaggacttgctcgtggatcccgtggagtcccctgagatcctcgatgatttggagcttcccaaggacgaagctgttgacatcaaa

SEQ ID NO: 51662 - DNA, 386 bp, Glycine max
  Clone ID: LIB3167-015-P1-K1-G8
gaaacttgaggtgcagttcatgtaatgtgccccctgctgaacttatctcccttgcaaagtctcaggttgactatcttcttggtgacaacccaagagccactagctatatggtgggctatggaagcaacttcccacaaagggttcatcacagaggttcatccattgtttccatcaaggttaacccttcatttgtcagctgccgtggaggttatgctacttggtttagcagcaaaaggagcgacccgaacctgctcactggtgctcttgttggtggacctgatgcatatgatgactttgctgatgaaagagataactatgagcagacagagccagcaacctataacaatgctcctcttatcggtattctggcaagactaggtggaggt

SEQ ID NO: 51663 - DNA, 394 bp, Glycine max
  Clone ID: LIB3167-015-P1-K1-G9
cccacgcgtccgaaaaaaaaaaaatttaaaaaaaaaaaaaaaaaaaaaaaaaaagaaaaaaaaaaaaaaaaaaaaaaaaaaaaaaaaaaaaaaaaaaaaaaaaaaaaaaaaaaaaaaaaaaaaaaaaaaaaaaaaaaaaaaagggggggccgttttaagggatccaagtttacttccccgtgcttgcaacgtaatagtttttttttggggccccctaaattaaattcattggccggggtttaaaaacgtcgggattggaaaaaccttgggtttaccaaatttaatggctttgaagaaaatcccctttttcccagttggcgtaataccaaaaaggcccgaaccgatcgcctttccaaaaagttgcccaccttgattggcaaatggaacccccctt

SEQ ID NO: 51664 - DNA, 384 bp, Glycine max
  Clone ID: LIB3167-015-P1-K1-H1
caaaatgactcaggcccagattcaaccagttaaacttggaacccaaggctttgaggtttcaaaattgggattcggatgtatgggccttactggagcgtacaatgaccctctccaagaacaggatggcatatctgttatcaagtatgcgttcagtaagggaatcacattttttgatactgcggatgtttatggagccaatgctaatgaacttttggttggaaaggctttgaagcagctgcccagagaaaagattcagatagccacaaaatttggtattgcttcacgaggttttcctgatttgaagatcaagggttcgcctgaatatgtgcgatcatgctgtgaagctagcttgaagcgtcttgatgttgaatacattgatctcta

SEQ ID NO: 51665 - DNA, 380 bp, Glycine max
  Clone ID: LIB3167-015-P1-K1-H10
ggcaacagaaacaaaagtggcagtattaggtggcatcaccgaagtgcagggagctgccaacagcgtcgagatcaacaatctcgctcgctttgctgtagaggaacaaaacaaaagagagaattcagttctggagtttgtgagggtgattagtgcacagcagcaagtggtttctggagtgaattactacataacattggaagcaaaagatggtgagattaaaaatgagtataaagcgaaggtttgggagagggaatcccaagagttgctagaattcatgccaacattaggtgcaggaggcgagatcgaccatctcgctcgctttgctgtagaggaacaaaacaaaagagagaatgcaaatcttgagtttgggggggtgatta

SEQ ID NO: 51666 - DNA, 100 bp, Glycine max
  Clone ID: LIB3167-015-P1-K1-H11
aaaaaaaaaaaaaaaaaaaaattatttaaaaaaaaaaaaaaaaaaaaaaaaaaaaaaaaaaaaaaaaaaaaaaaaaaaaaaaaaaaaaaaaaaaaaaaaa

SEQ ID NO: 51667 - DNA, 403 bp, Glycine max
  Clone ID: LIB3167-015-P1-K1-H12
aaaaaaatctcaaaataaaacaaccaaaccacacacttcacaccctcttcaacatcctcagcaagtacaagaacaagaagaaacaatgtcttgctccaatctcacaatgttggtgtcctcaaaaccttccctttccgatccctccaatctctccttccgctctgtcctcaacccttttcagctcccttcacaaaacccaacttcatgcactccttcacgctcctcaaccacccaaattcagtgtggtctgagagaactcagaacccgcattgattccgtgaagaacactcagaaaatcaccgaggctatgaagcttgtggctgcagccaaagtgagaagagctcaagaagctgttgtcaacggaagacccttctcagagaccctcgttgaagtcctctacaac

SEQ ID NO: 51668 - DNA, 387 bp, Glycine max
  Clone ID: LIB3167-015-P1-K1-H2
gggtgaggctgtttcccagctacaactatccactttttgatcgcttcaattttggagctcgatgtcgctatctgattgtcgagggaagattcctaacttctcttgtgcaaaggatccaacgtcgcataagattggttatgggccgagtcaaagcctggacggagctactacagggtgatgatgataaagatggcgctcccacatacaaatgcagtgtttatggaatgaaaatggagccatatgaataaaacgctgcatgtgaatggcctatgctattgatcagatgcgtcaggagttatgaactccagcaaggggaacacggatcactgactttgcgacgcatcgtgacacactaacttgcgccattcacatgctgtgtcaaactca

SEQ ID NO: 51669 - DNA, 311 bp, Glycine max
  Clone ID: LIB3167-015-P1-K1-H3
tgctccttcttcgggttggaatgaacaaaactaaattgtgttagctataaatcaggatgcgtggaacttgaagctttgaaagcaaggagcagctacagtcatatttgaatgccagttttgaagttaaaatgttaaattataattcacgagttagataagtgattgtacttggcactagaattttttagtttttctaatcttatattcaatctgtctcggagttaattatgcctatgcttctttgtaccaaatatagcttttggcctttacacaggcttaataataattagaagaaacaacactttccattc

SEQ ID NO: 51670 - DNA, 65 bp, Glycine max
  Clone ID: LIB3167-015-P1-K1-H4
accacgcgaaacgaactactttttagattatacaacacagcttatgcaaaatattttattgaaac

SEQ ID NO: 51671 - DNA, 383 bp, Glycine max
  Clone ID: LIB3167-015-P1-K1-H5
cccacgcgtccgatcggttttaaaaagtactttggcgtgtggttggaaacaaataatagagaaaataaaaaaaatgaatgttaaggtgcatagctctgatgataccaagaaggatgaagaggttgtgcttcctggctttagattccaccccacggatgaagagcttgttgggttttatctgcagagaaaggtggacaaaaagcctctaaaaattgaactcatcaaacaggttgatatctacaaatatgatccatgggatcttccaaaggtgaattcttttggggacaaagagtggtattttttctgcataagagggaggaagtacagaaacagcgtgaggccaaacagggtaactaggtcagggttctggaaggccacaggga

SEQ ID NO: 51672 - DNA, 279 bp, Glycine max
  unsure at all n locations
  Clone ID: LIB3167-015-P1-K1-H6
cacgcgtccggcaagagggggcggactctccattgattaagatccaattgggagcttcctcccccacgagccaatagtcttaaactccttccctgaagacaacaaagacaacaacaacagtcgccaacaacacaagtggaaacttggtacaaacatggatgccactgttagcagaaagagttctccatcatccacttctaacactaacaccaccatccccttccaagaccaccttacctctgaaatttaaaatanaaaaatattttaataaattaatta

SEQ ID NO: 51673 - DNA, 379 bp, Glycine max
  Clone ID: LIB3167-015-P1-K1-H7
tagatagagtgatacacatcacattttctcaaagtaatttattaattaataaataaatggcggcggcggcggcagtgacggtgctactcccacctaggattccgaccgccaccaacgttacccgctgctctgctttgccttctctgcctcctcgcggcaccaacactaaaaccactttgctcttatcttccctcaaccacttctcagtgtcccgaaaatcttctctgcttcagaccagagcttcttcagaggaatcatcctcagtagatgccaatgaggtgttcacagatttgaaggaaaagtgggatgctcttgaaaacaagtccacagtacttttttatggtggtggggctttagttgctgtttggctatcgtcgat

SEQ ID NO: 51674 - DNA, 372 bp, Glycine max
  Clone ID: LIB3167-015-P1-K1-H8
cccacgcgtccgagtgatcggtgttcacttgatctcatcataatcgtcagcgtcaattgaagaagatgccgatcagaaacatcgccgtcggaaggcctgaagaggcgactcaccccgacacgttgaaggcggctttggctgagttcatctcaaccttcatcttcgtgttcgccggctcaggctccggcatcgcctacaacaagctcaccgacaacggcgctgccacccctgccggcctcatctccgcctccatcgcccatgcattcgccctcttcgtcgccgtctccgtcggcgccaacatctccggcggccacgtcaaccccgccgtcaccttcggcgcctttgtctgtggtaacattacctttcctccgc

SEQ ID NO: 51675 - DNA, 383 bp, Glycine max
  Clone ID: LIB3167-015-P1-K1-H9
cagatttcctgacatagcttatgtcagtctaaagatgccaaatcttcatttcttacctgtcaatatctcaaacaaggatggtcctattgtgaagtttgaggatgatgtgtacttgccaacggatgagcctcatgggtcaattcaagctagcttgagccgcctttggtcaaagctgtagaaactgcagaagctatggtgctcatcccttctgtggtggattgccagtgcagcctaaaataccgaacctggccttagagatagtgctttccattaatgtgtcttgtaattctggtttttgtcatcgttgtatttgtttcgtggagaactattatgcatgaataacttccaggagggatattctgcaagttacaccaatgttaagt

SEQ ID NO: 51676 - DNA, 408 bp, Glycine max
  Clone ID: LIB3167-016-P1-K1-A1
cttagctacaagctaaggaaggatcaaagagaatggctcaagcaatggcatcaatgactagcttacgtggttcctctcaggctgtgttggaaggtagccttggctccacacgcttgaatgtggggagtggaagcagggtggcctcagtcacacgtgcagggttcacagttagagcacagcaacaacaagtgaatggtggtgaggtacaaagtagccgtagggcagtgctttcacttgttgctgctggtttgaccactggctcttttgttcaagctgtgcttgctgatgccaaacctatcaaagttggaccaccttccccaccttctggcggattacctggaacattgaactcagatgaaccaagagaccttaaactgccattgaaagataggttctttcttaaccatt

SEQ ID NO: 51677 - DNA, 286 bp, Glycine max
  Clone ID: LIB3167-016-P1-K1-A10
cccacgcgtccgcccacgcgtacgtccacgcgtacgacaacccgtccggtcttttggtttttttttggtggtttggctggggcaatccttggggggcaatgaaaaagaacccaattggaaaccataaaacccccaagtttaaccacattaaaaaactaattgttgacaaattaaaaaggtccattgtgaaaaaggaagcaattgcaaatggagggtttgttgaagcataaattccaccaccaactgcaattcctgccatacctgatccccactctgcaatgaaggg

SEQ ID NO: 51678 - DNA, 414 bp, Glycine max
  Clone ID: LIB3167-016-P1-K1-A11
ctagtttcttacaagcctctactatactgcttcaccttctgctctagaaaattcagtgctgaaacatggcttcgggtactctctctgtagccaaaccagcccttcaggcaaatgggaaaggcttctctgaattctctggcctccgaagctcatcaggcttccttcccttttctagaaaatcttcagaggatttccattctgtcattgccttccagacctatgcagttggaagcagtggaggatacaagaagggtgtgacagaagcaaaactgaaggttgccataaacgggtttggaaggattggaaggaacttcttgaggtgctggcacggtcgcaaagactcccctcttgatgtcattgccatcaacgacacccgcggcgtgaaacaagcctcttaccttcttaaatacgatt

SEQ ID NO: 51679 - DNA, 394 bp, Glycine max
  Clone ID: LIB3167-016-P1-K1-A12
cccacgcgtccgacctgactcaccccacccaatcctattcccatcccatttgaacctgtccttctcgcagagtgggcgagcaagcgaatatcccaatcccacaccaatggcatgctcagccacctctgcttccctcttctccgcaaacccaacacccctcttctctcccaaaccctctctctccctccaccttaaccctctccccacgcgcccttctccctccctcacgcgcccttctctctccctcacgcgcccttatcactcttgccgctccttcgttgtcaaagcctcctccagccagcttccgttggttggtaacaccccaccggatttccaaacaaaagctgtgtttgaccaagagcttatcaaccagaaactatttgattacattggg

SEQ ID NO: 51680 - DNA, 286 bp, Glycine max
  Clone ID: LIB3167-016-P1-K1-A2
cttggaatcagatgacgaagaagatgaagatgaagatcaatatcaatataaagatgatgatgaagaaaagtttgcctagagtccggagcaacttctattgctctccatctattttcccctcctcaagtttaataaagctttgtatacgttgtatcatcatgcttgtagtgtattgccctttcttgcatttgtttttcccacaatactaatggaatcatgacaacaatttgacttttatatgaactgaagttgtttctctataaatatttggagcccatttatcatc

SEQ ID NO: 51681 - DNA, 424 bp, Glycine max
  Clone ID: LIB3167-016-P1-K1-A3
ccggaacggaagggccgacccgaccgacgcgtccacgcgtcgcgtccacgacgttcgcccacgctgttcggaaaaacaagtagttgagaactaaggggaaggaaatggcttcctcgcgtatctcctccccacctgttaccaccgtcaaccgtgccggtgccggcatggttgctccattcaccggcctcaaatccatggctggcttccccacgaggaagaccaacaatgacattacctccattgctagcaacggtggaagagtacaatgcatgcaggtgtggccaccaattggcaagaagaagttcgagactctttcctacttgccagacctcgatgatgcccaattggcaaaagaagtcgaataccttttaaagaaaagatggattccttgcttggaattcgagttggagcaccgttttttgta

SEQ ID NO: 51682 - DNA, 90 bp, Glycine max
  unsure at all n locations
  Clone ID: LIB3167-016-P1-K1-A4
naaaaaaaaaaaaaaaaaaaaaaaaaaatttttttttaaaaaaaaaaaaaaaaaaaaaaagggggggtttatataaaaaaaaggggggga

SEQ ID NO: 51683 - DNA, 185 bp, Glycine max
  Clone ID: LIB3167-016-P1-K1-A5
cccacgcgtccgcacacttcccccaatttccaaaccaaaccctctctcttccggcgttctgggggtggcgtcgccggcgattcccccctccggttccctctccacccttcaattcaaccctctcgttttcgtttcactgattccctttttcaaaaagctttccgatcgcttgctagggttttcct

SEQ ID NO: 51684 - DNA, 415 bp, Glycine max
  Clone ID: LIB3167-016-P1-K1-A6
cccacgcgtccgcccacgcgtccggagataactagaaacagtgtgatgaaaatgaaggtccttgttttcttcgttgctacaattttggtagcatggcaatgccatgcgtacgatatgttccctctccgaatgaacactggctatggtgcccgtactccggaggtgaaatgcgcaagttggaggcttgctgtggaagcacacaacatctttggctttgagaccattcctgaagagtgcgttgaagcaacaaaggaatacatccatggcgaacaatatagatcagactccaaaacagttaaccaacaagcttacttttatgccagagacctcgaagtccatcccaaggacacatttgtgttcagtatagatggcaccgtactttctaatattccatactacaaaaaacatggatatg

SEQ ID NO: 51685 - DNA, 262 bp, Glycine max
  unsure at all n locations
  Clone ID: LIB3167-016-P1-K1-A7
acccacacgtacgnccacacgttctattttcttaattttttttcaggcgaagtggngaaaaaagagggcgtgctcttaacctgaaagtgtcgttcaacactcattttcaaccttatgagaaaattgtaaggaaagagtaccacctggtcacttttgatcttccctactttgccttcttctacaaccagaaactttttttttacaagggttaatattttgagtttttcgtccaaaaacttatacttttactttctttgtttct

SEQ ID NO: 51686 - DNA, 381 bp, Glycine max
  Clone ID: LIB3167-016-P1-K1-A8
gaaggggggggggacccacgcgtccgcccacgcgtccgcaacgttgtgccattggcacccacaaagagtgtctcccatattaccatctttcccaccaaattgaggggcccgcgctcctcacctcgttactctccgattagggttgcaaccgtggagcccgacacttcaactgtcgactacaactctgcgttctcagtgtttcctgcagaagcatgcgaaactgtaggaggggaagcctgcatggcggagatgtaccctgaaacgaagctacagccagaggctaagactccacgagtcgttacagagaacgttgagagagagtatcttgaatacgatgatcctaaaacggtatttcgaggagaggcttgtgatgatcttgga

SEQ ID NO: 51687 - DNA, 416 bp, Glycine max
  Clone ID: LIB3167-016-P1-K1-A9
cgagaaagcagcggtgacatgtctggcgccaagaacaagaggaagcaaggcgaagacgaggccgtttcggggagccggcgtcagaagaaggcgcgtgaggatgaggctgtgacggatgaggaggtggaggagttctgcgccattctccgccgaataaacacggcggtgaagtacttcaagagccacggcgaggacgtggcagcgttggagaaagatatcatgcaggatgtgaaggaggcaaccagaatgagtaatcagaatgagaaggaagaagacgacttgagtttggatctaaatgtcactccccaaacccccacctgagacttcgactcaaacctcaatattattaccatctttctctccctttctttcgtttctatttaacatatggattttcttatatgtcccctatgaat

SEQ ID NO: 51688 - DNA, 423 bp, Glycine max
  unsure at all n locations
  Clone ID: LIB3167-016-P1-K1-B1
gtaccggttaggaaaggccggccggacgcgtccgaccttgttcgccctctttctactttgtgcccttacctcttacctaccttcaaccaccgctggtgatgttgtcgacactgatggtaatcctgttnaaaatggaggcacatactttgtgttgccaactataatattaaacggcggtggaatagaatatgccacatttggaaatgaaacttgccctgtcactgttgcgcaatctcgcgatcagttctgcaagggctttccgataaccatttcatcctcagcccgaatccgtcacatcagcgaaagccttaatttgaacattgggttcactttcgcatccccgtgtttccccgcttctgagtggaccattgtgaaagatcaaccaaaaagacttgctgttaaactcactgggtttaaaaatac

SEQ ID NO: 51689 - DNA, 408 bp, Glycine max
  Clone ID: LIB3167-016-P1-K1-B10
cctcttcctcagtagtgcgattttcgattctcttctctgcaactatgcctaaccctgaggtcttcttcgacatgggcgggggcggtcaacctgccggccgcatcgtgatggagctctatgccgacgtgactcccagcaccgccgagaacttccgcgcgctctgcaccggcgagaagggcgccgggcggagcggcaagcccctccactacaaaggctcgtccttccaccgcgtgatcccgaacttcatgtgccagggcggcgacttcaccgccggaaacggcaccggaggcgagtcgatctacggcgccaagttcgccgacgagaactttttgaagaagcacactggtcccggcatcctctccatggcgaacgccggtcccggaaccaacggatctcagttctttatct

SEQ ID NO: 51690 - DNA, 411 bp, Glycine max
  Clone ID: LIB3167-016-P1-K1-B11
cccacgcgtccgcccacgcgtccgaaggcaagcacataagcacaatcatcgatatcttcaacttcatcgcacctggtggggtccacctccaccaccagcacatgctcctacctctctttttccaattcgaacaggaccttccttaatctccacccattcgataccaccctctccctccggttccgattcaacggttctagaagatgcctcggcgggtccagatcgaagatcccaaatacgacgacgttcctgacgccgacgaaccggaggaaacgatccgtttcaaatcctccaacagcaacgtctccgacgaccaagaacccttcatgggcatcaaggttcgccgaaaagcctctttccacagagaccacaaaggagactacctcaaccgtcccttcccacccttttcta

SEQ ID NO: 51691 - DNA, 356 bp, Glycine max
  unsure at all n locations
  Clone ID: LIB3167-016-P1-K1-B12
cccacgcgtccgcccacgcgtccgaggattggtgggtgatgaagtgaagagttctgcgattgcgaatggaagtgagcgcgaaggtgaaggtgggtgggtttctatggttggagggtttggttgaggcgtgttgccttcatcgcgttgttattctgtgtatgaggtcaaacaacctattgatgcgaactggtcagtgtttcctcttaaatggtttcatcttcttaggaagtatattcgtcctaaactcggttgtcatccctgcattgtggtggatattacctgaccaaagctcacagtttgtttcttataaactctgggacttangtggcactttgaaattttattctttcgtacgt

SEQ ID NO: 51692 - DNA, 325 bp, Glycine max
  Clone ID: LIB3167-016-P1-K1-B2
attctaggcaggttttccaccagaagcttgaggggggaaatcttgcaatggagaggagtatgcactatgggattgaggtcagggttattcgtggggtgcggtatgagggtgctgcctctgctaccgggaggttgtatgtgtatgatgggttgtataggattcatgagtgctggtttgatgtggggaagtcgggtttcggggtttataagtataagctgtgtatgattgatgggcaggctaagatggggactgtggtgatgaacgaggcgcttatgcttaagaaggatccccttgagtttcaaacccatgtgttgtttggtctctt

SEQ ID NO: 51693 - DNA, 294 bp, Glycine max
  unsure at all n locations
  Clone ID: LIB3167-016-P1-K1-B3
tccgaacaaacctggtgaaaaatgtgacagttagataagccacattctttaaaactcaaaatggtgtaaaaataaagttttgggtgtggccaaccantgaatttgtggaggatgtccattttgaacatgcaacaatgtctgatgtccaaaaccccattataattgaccaacattattgcccatttcgcaatggttgccctagtcaggcctctggggtgaagataagtgatatttcatacaaagacatttatggaacatctgcaacgcatgttgttgagaaatttgattgtattt

SEQ ID NO: 51694 - DNA, 422 bp, Glycine max
  unsure at all n locations
  Clone ID: LIB3167-016-P1-K1-B4
ggccaaaccagggacgcggcgaacctcatccacatggcgcagtgggagagcgccaggcgagaagccgaagcgagactcgtgagagaatcaaagctgcaagtccagaacaacctgggatcatgctccagcacacaacctgcgagacttgttctcaacaaaatcacaacacaacaacaaccctcgctgccaccgtgcctcgacatcctcaaagcatggcaaagctcgtggaacaaaccgccacaacaaccaacaacaaaagaaaacaacaccaagataatgcatagcatgtatgcaatgatgctttccactgatgacactctagagtctccaacatccacgttgtgcttnccaggaacaacaacaacaacaacaatgctttctatctccaacaacattggattactcttcaatgaaaacaacaa

SEQ ID NO: 51695 - DNA, 391 bp, Glycine max
  Clone ID: LIB3167-016-P1-K1-B5
cccacgcgtccgcgcaggtggcgccgagccaccaccgccaccctccgccgcattctccgccagcaaggccttcattgctggcgtccgcactctctggaatcttcgtagccatggtcttggcttaaaaactttcgagagaagcattgtctttgatgattcgtgcacgtggaggcttttccgcccttgatccttctttcccgcacacggacggacgagatccatttgatttgtttcatcctctggtcatatgttgagttagcggttttattttcttcgggttttgtgtttacttattttgttctagttttgtactttgttgatgtgtttgtccattcgagatttgtgaggggtggtggccgttgatgatgattatttggtggttcatttgatt

SEQ ID NO: 51696 - DNA, 388 bp, Glycine max
  Clone ID: LIB3167-016-P1-K1-B6
ctccctcttctcttctacggttatggcgtccacgttgggcacttcttcaattgcgggggttgcttcgcgctgcatctcggcggtttcttccaagccttccattcacacactctctctaacttcagggcagagctatgggcggaaattttatggaggaattggaattcatggcatcaagggaaggtctcagctctcagttgccaatgttgccactgaagttaactctgtagaacaggcccaaagtattgcttctaaagaaagccagaggccagtatacccattttctgccatagttggacaagatgagatgaagctttggcttcttcttaatgggattgatcctaagattggaggtgtaatgatcatggggagaaggggtacagggaaa

SEQ ID NO: 51697 - DNA, 153 bp, Glycine max
  unsure at all n locations
  Clone ID: LIB3167-016-P1-K1-B7
cccacgcgtccgcccacgcgtccgcccatgcgtccggtcacaatcacaaatctgagtgtagtggattaaggtttttttggttttganataaacatgagcaggagtttgggaattccggtgaagctgctccacgaggcttcggggcacgtggtg

SEQ ID NO: 51698 - DNA, 243 bp, Glycine max
  Clone ID: LIB3167-016-P1-K1-B8
cccacgcgtgcgcgtactcatatatttgtcttcatcgctgacacgtgaacacacgcgtgtggctacacataagcggactgttggcctaacaacttatactactcattttttgcccccttaaaaaacttcttattgaaatctttaaaagcgattacttcaaacttttttttattttattcaaacaatttttcttaaagtttcattatttcccttaactataattgtctataatattaggttact

SEQ ID NO: 51699 - DNA, 381 bp, Glycine max
  unsure at all n locations
  Clone ID: LIB3167-016-P1-K1-B9
gttctcagaaactctgcggaattggctttcggaaaaaaaagcattttgggattgaaggacattgatgtatacgcgtttgtggtttatactgatgatgaggacataaagagacatctttctgagaaatatgggaagttgtctgcgtctgaattgcagggcagtaaggagtttactgaagatcttatggaaagtgatatttccatgacaattagacttcaaattgtgtatgggagattgagcattcgttctgtacgtagtgcatttgaagagtctgtgggaagcangctgcaaaagtttgggggatcggataataaggaattgcttcaaagcttcacttcacaatttaaagatgaattcaaaattccccgtggatcttgaatt

SEQ ID NO: 51700 - DNA, 348 bp, Glycine max
  unsure at all n locations
  Clone ID: LIB3167-016-P1-K1-C1
ggaggatattgtcctcagaggacattctattgaatgccgtatcaatgcanaagatgcttttgggggatttagaccagggccgggtagaattacagcatacttgccatctggaggtccatttgttagaatggatagccatgtttatcctgattatgtggttcctccaagctatgactcccttcttggaaagctgattgtatgggctccaacaagagaaaaagcaattgaacgcatgaaaagggcacttgatgacactattatcacaggagttcctactacaattgattatcataaacttatccttgacatagaggatttcagaaatggaaaggttgatactgcttttat

SEQ ID NO: 51701 - DNA, 328 bp, Glycine max
  Clone ID: LIB3167-016-P1-K1-C10
cccacgcgtccgcccacactcccatctctcacacccctcgcatccaacaatgtctctcaccattccctccaacctgtgcgggcccgccgccctccgccccaaactaagcccaaagctaaggtccgccgccacaaccaccatcgtctgcagcaccaccaacaacaacaacaacaacaacgtgtcctccgacctgaaggcgttctccgccgcgctggccctctcctccatcctactctccgcccctctccccgccggcgccgacatctcggggctcaccccatgcaaggagtcgaagcagttcgcgaagcgtgagaagcactcgataaag

SEQ ID NO: 51702 - DNA, 407 bp, Glycine max
  Clone ID: LIB3167-016-P1-K1-C11
cccacgcgtccgaccgcggagagtttgctatctgcatcatcgatcatcgtcacctcatggacggacacgattcacaggagccgaagcagagccctgctgacatgactgcctttgtgcaaaatcttctccagcagatgcaaaataggttccagacaatgtccgactccattgttacaaagattgatgatatgggaagtcgcataaatgagttggaacaaagcatcaatgacctaagagcagagatgggagtggagtcctctccatcacctgcgacccctgctaagccaacagaggaaatcaccaaataagagggttcagcttaaggggcgtgttctgatttcagttgctcgttattcatgtattcatgtatcgaattgcacaaaggatgatgttatgcatttactttt

SEQ ID NO: 51703 - DNA, 381 bp, Glycine max
  Clone ID: LIB3167-016-P1-K1-C12
cggacgcgtgggattcttccaaagtgtagttaatagacgtgccaagttcctctgtgttctctttgcctcgacactctgcattcaagttccataatggcagcaaccatagcaacaacaatggctatgatcaactcaaagtgcatcaacacaacagggtcatcacacaagttgcacaaccccaagctcccaccctcaaaacccaccctctcccttttctcccttcagaacctcccaaagggcctaacctcccacgtctcaacttccacagcaggcactgccatcgcaggcgcaatattctcctcactcgcaaactgcgacgcagccttagctgcatcgcaaattgctgaattagcccaaagtgataaaccgctggctggcatt

SEQ ID NO: 51704 - DNA, 402 bp, Glycine max
  Clone ID: LIB3167-016-P1-K1-C2
caaggccaagcgctgagagaaaaaggttcagaaatgggtttatacacgagcgtgatggaagagataagtttttacacagggcgtatctcccgctgcgtttttcaccattttggctatgatggtcgtcgtttacagaaccgtgagcggcatgtttgtgtcccccgaagactacaacaagccccccgtcgtttcggcccgagccaattcccggttagacgagtccgagccgccgcgcgaaccggtccaattgggcgaaataacggaccgggaattgcgagcctacgatggctccgaccccagcaaaccccttctgatggcaatcaaaggccagatctatgacgtgtccaatggcatgaatttttatggtcccggaggaccatatgcaatgtttgaggaaaggaa

SEQ ID NO: 51705 - DNA, 364 bp, Glycine max
  Clone ID: LIB3167-016-P1-K1-C3
gaaacagtgtgatgaaaatgaaggtccttgttttcttcgttgctacaattttggtagcatcgcaatgccatgcgtacgatgttttccctatacaaatgaacactggctatggtgcccgtactccggaggtgaaatgcgcaagttggaggcttgctgtggaagcacacaacatctttggctttgagaccattcctgaagagtgcgttgaagcaacaaaggaatacatccatggcgaacaatatagatcagactccaaaacagttaaccaacaagcttacttttatgccagagacctcgaagtccatcccaaggacacatttgtgttcaatataaatggcaccgtactctttaatattccatacta

SEQ ID NO: 51706 - DNA, 301 bp, Glycine max
  Clone ID: LIB3167-016-P1-K1-C4
gagaaatatagaaatggcgtcgtggtgcggtgctcggagcttccagattccggcgatggaagacagcgcactgcgcaaccgtgcttcattggccgccggagtagggtgtttgtcggtggccggcacctccttctggcgctcctcttcgtcaccgaagcgctctttgccattcacatgcttgagcatttcttccgatactcgtattaaggaaagtgttcaaactgaatgtgcacctgctgctttgggaccatattcttaagcaatcaaattcaacaaccttatttttgtgtttggctgtttt

SEQ ID NO: 51707 - DNA, 268 bp, Glycine max
  Clone ID: LIB3167-016-P1-K1-C5
ggaaacaaagcagtataacacaatagcttattcattagttctcatggattaatttccattgaagtccggaaacagaaaccaaaaatacaggatgatgaaatctcataaagcaaaaacaaatgggaatgtagtttaagtacaacaaacaaagtggggtggctacagatgctttgcaaattttgcaatgacttaaaagcctgggggcttgtaagcgatgaagctgatgcactgcacttggcgaacgttgtcaaatccaatgataccgatg

SEQ ID NO: 51708 - DNA, 359 bp, Glycine max
  Clone ID: LIB3167-016-P1-K1-C6
ctcgctcggtcctgtttgtgaggcactggctatttgtgaatggcacttgataagaggctatgcaacggacactgggatgccagaaactaactctttaaaaaacacagctgctggctctgacatcaataaaccatctccaattgagtctccattgtgccgagaaaagaatatgatgccctaatacgttcccaagtatgtcacaggaccagtatatgcttgcgatacctatggataatgcacgtgcaaatgataacggcacatggcatatgaagaatactttgccactcaattaagaaggtttagattacatttgcggtccacgaagctgggttttaccctattaaatgaatagttctaac

SEQ ID NO: 51709 - DNA, 312 bp, Glycine max
  Clone ID: LIB3167-016-P1-K1-C7
cccacgcgtccggacacttgaaataatgccaagtatactaaatgtcttagtcttaagaggggggaaaactggaattccggtgattcttaatttcttacaatccaatctgcaaactgagtgagatatataacttgttttttatttcttcctcatcattttgcatatacaaagattaaaatggaagggttttttggaaattgcttcaatatgattttgctgatgttgtgcttcaccaacttgagcatagcttttgctcaaagtcatatgaatggatttggagagcaaccactgtccaagaatgccattttacaa

SEQ ID NO: 51710 - DNA, 341 bp, Glycine max
  Clone ID: LIB3167-016-P1-K1-C8
ctcactcactcactcactcactcactcactcgcaagcaaaaagaaagaatcccaggcgaggagaaagatggaggggagggagcaggatgtgtcgttgggagcgaacaagttccccgagagacagccaattgggacggcggcgcagagccaagacgacggcaaggactaccaggagccggcgccggcgccgctggttgacccgacggagtttacgtcatggtcgttttacagagcagggatagcagagtttgtggccacttttctgtttctctacatcactgtcttaacctgtatgggagtcgccggtgcttattctaaatgtagtaccgtttgggattcaa

SEQ ID NO: 51711 - DNA, 327 bp, Glycine max
  unsure at all n locations
  Clone ID: LIB3167-016-P1-K1-C9
cccacgcgtccgttgctattaagaagattaagagagtggagtttatggggctggcgcgcttaattataatgatgatgtgctgttnaaaaactncnactgctgcggatgacttggcaaccaagtgttcggcggtgattcataatgtaataccgagtctgaacttttctacggggaaggaagaaatgcccaaaaaggaatgttgcgactccgccacggccataaaggaaagcaacccaaaatgcttgttctacatcattcaagaaacccacaacggtatcccacatgtcaaaagcttgtgcatttcaaaaatccaaactgcttcaactt

SEQ ID NO: 51712 - DNA, 330 bp, Glycine max
  Clone ID: LIB3167-016-P1-K1-D1
ctttcttcacaaaatggcctcaactacactatcaaccctctccctccgcaacctctcttatgctacaccctactcctcttctgaccctacgcacctctccgccaacccctcctccctccaattccccaacttctcccaccgcgccaccaccacgcgccgcgcccgcgtcgtcgtcgtctccgccgtcgaggcaccggagaaaatcaccaagctcggcgacgaaatcgcgggactcacgctcgaggaagccaagaacctcgtcgacttcctccaagacaagctcggcgtctccgcggcagcgttcgcccccgtagccgtcgccacgggttg

SEQ ID NO: 51713 - DNA, 408 bp, Glycine max
  Clone ID: LIB3167-016-P1-K1-D10
aaaaaacccttagccaacacaaccattatggccacctctgctattcagcaatcagcattcactggtcaaactgctctgaagcagctcaatgagttcgtccgcaagaccggtggcgccggcaaaggtcgcactaacatgcgccgcaccgtcaagagtgctcctcagagcatttggtatggccctgaccgtcccaagtacttgggtccattctcggagcagattccatcatacctgaccggagaattccctggtgactacggatgggacactgctggattatcagctgacccggaaaccttcgccaggaaccgggagctggaggtgattcacaacagatgggcaatgccttggtgccccttggctgcacccttcccagaatatcctttgagaaaaaatggtggtcaaatt

SEQ ID NO: 51714 - DNA, 367 bp, Glycine max
  Clone ID: LIB3167-016-P1-K1-D11
gctgttggagcttttcttcatgttctgtggaacattgggggttttctcaccacgttggcttccattggaagcatggtttggttgctatctacaccccctgttgaagagcaaaagaggttgtctctgatgatggcttcagcctcgtttcagggcgctatcattggacctctgattgatttggctattgccattgatcctagccttattgttagtgcatttgtggcaacttatttggctttcgcttgcttctctgcggcagctattagtctgcaaggcgtatggagtacctgtaccttggtggttagctttcttctgagctttccattcttatggggttgcactttgcttactatctttttcggggctc

SEQ ID NO: 51715 - DNA, 341 bp, Glycine max
  Clone ID: LIB3167-016-P1-K1-D12
tgctccttcttcgggttggaatgaacaaaactaaattgtgttagctataaatcaggatgcgtggaacttgaagctttgaaagcaaggagcagctacagtcatatttgaatgccagttttgaagttaaaatgttaaattataattcacgagttagataagtgattgtacttggcactagaattttttagtttttctaatcttatattcaatctgtctcggagttaattatgcctatgcttgtttgtaccaaatatagcttttggcctttacacaggcttaataattattagaagaatcaacactttccatttaaaaaaaaaaaaaaagggctgccgttttta

SEQ ID NO: 51716 - DNA, 278 bp, Glycine max
  Clone ID: LIB3167-016-P1-K1-D2
acggtgtcatcttttgagttgaaatgcatgatggactccaattttgaagaactgaagtctgaaaccttcaagagatggggtgcacaagttttttttgtatttgtaatttataccttgacaggtttacttttgactgattcatttcatgctcaagtgtccattaaattctataggatttacatttcattttaaaaaaaaataaacttaatatttatatacctaaaaataaatttactatattatataataacattaaaaaaaaataataaaataaaatc

SEQ ID NO: 51717 - DNA, 312 bp, Glycine max
  Clone ID: LIB3167-016-P1-K1-D3
cccacgcgtccgcccacgcgttcgacatatttttgcaacccaaagtcaaacaaagaaaaagcgccataaagcaactgaactgggtggattgattgttttatgataaaaaggcctcatgccttgtctcctatttttttttttttttttgtaaatcaaaaagttccctttctttttgttatattggtgtttaataatttggaaaaaaggttaaaggttagtgtttgaaagttgttctttttttgttaggtaggtttactcgtaggcatttttatttgcacgtttcttttgttagtgcaagatcacatatttgtt

SEQ ID NO: 51718 - DNA, 364 bp, Glycine max
  unsure at all n locations
  Clone ID: LIB3167-016-P1-K1-D4
cccacgcgtccgcggacgcgtgggttcatgaatatggaaggcatccttccggatcagcagcgtttgattttcgccggaaggcaacttgaagatggaaggaccttggccgattacaacatccagaaggaatcaacccttcaccttgtcctcaagcttcgtggtggcatcatcgagccttccctcatggctttggctcgcaaatacaaccaggacaagatgatttgccgcaaatgctatgctcgtctgcaccctanggctgtgaactgccgtaagaagaagtgcggtcatagtaaccagttgaggcctaagaagaagatcaagtaaattctgggtgggatattggtggtctctaacttccgtttgt

SEQ ID NO: 51719 - DNA, 178 bp, Glycine max
  unsure at all n locations
  Clone ID: LIB3167-016-P1-K1-D5
cccacgcgtccgattcaatgggaagaggggtantgtgcctgatccttcaaggtggccagaaggggaaggcccgatgacgggggggtggttcgaaggatggatgcctggttaaagcccatacgtggtcactcagatgggtgttgatccccgctagaaactgtaataaaaccttgagcta

SEQ ID NO: 51720 - DNA, 405 bp, Glycine max
  Clone ID: LIB3167-016-P1-K1-D6
cccacgcgtccgaagattttcatttgaatgaattgggttgctcttcttcgaggcacacacaatggataaagtaaatagagtgtgtgccaaagatgaagagcgtccactccgaatcaccagagcaagagctagagccttgagagggattactccatactcaagaccctccttaaaaaatgagcagaaaaatgtgcttcgagcacatccgaaaagagcagcatcttctgaaaacaaaacttctgtggttgttcctgctgttgtccaacacaaaggaagggcagtgctttcagatgtatcaaacatgtgtgcaaaaccacatgataagtgtactaagtcatcaaagtttcaggccaaaggaggctatacaaatgaaaccaccaagctagcaaccttaggtgtttccac

SEQ ID NO: 51721 - DNA, 407 bp, Glycine max
  Clone ID: LIB3167-016-P1-K1-D7
ctttccgaaacacctctacctgttcttgttctctctaccggtaattgcatgaacgatggttggtcaatggcaaaaccggaagccagtttgaaaataatcatatcatcattttgacctaatcaaatcgaaacaaccacctaatctcactctgaaaatcgtttccctttgctgaacttgaacaggtcggagaaaactctcggttgccgtagcccctcacgtgcaattaagacagtaccaattctattccatggcctctaaaatcgaaagcgagaattcaaccgatacttttccatcatcggcaaagaacatatttcaagatccaaatgattggcttcaacgctttttgcttgaattggaattttgtcagtgccttgcccatcttacctaacatcactttttggccctaa

SEQ ID NO: 51722 - DNA, 328 bp, Glycine max
  Clone ID: LIB3167-016-P1-K1-D8
actacgcgtacattagtagtagaccgcttgcggtcgtccttttaaatggaatgggcggaaactatcatatcgataaggggaggttaagtgaaaattcacacaattatatttacacaatctgatggttatcaacctaatgacataactgcaagagaacactgtttttgacacatgcaaggcgcacaagaaattgcagcaacattttcaatacattttttattcataatttatattctaattcacaattcatttattggcaacttctatcattcttaactttatttattcattttaacaaacttcgctaaatccctttttcaatttctta

SEQ ID NO: 51723 - DNA, 416 bp, Glycine max
  Clone ID: LIB3167-016-P1-K1-D9
ccacgcgtccgcccacgcgtccgcccactcgtccgcgagataactagaaacagtgtggtgaaaatgaaggtccttggtgttcttcgttgctacaattttggtagcatggcaatgccatgcgtacgatatgttccctctccgaatgaacactggctatggtgcccgtactccggaggtgaaatgcgcaagttggaggcttgctgtggaagcgcacaacatctttggctttgagaccattcctgaagagtgcgttgaagcaacaaaggaatacatccatggcgaacaatatagatcagacttcaaaacagttaaccaacaagcttacttttatgccagagacctcgaagtccatcctaaggacacatttgtgttcagtatatatggcaccgtactctctaatatttcatactacaaaa

SEQ ID NO: 51724 - DNA, 253 bp, Glycine max
  unsure at all n locations
  Clone ID: LIB3167-016-P1-K1-E1
gcagagagagagnaagttttcatgtttcagatagttttgcaaaagcaatagcaatgggttggatcggtgagactgttgattccatgcggatctcttcaaatccgccaggtcctcacccangctgtgagcctaagcatgattgttacgtctgcactgataatatggaaggcattgatgtgcgttactggcagtgaatctcccgttgttgtttgtctttctggaagcatggaacccggattcaagcggggagaca

SEQ ID NO: 51725 - DNA, 367 bp, Glycine max
  Clone ID: LIB3167-016-P1-K1-E10
cccacgcgtccgcccacgcgtccgagaggttctagttgtcctcattgattgtagttaatttgcaccttttgtttctctctagaaattagaagttcatgcttaaactttaccttgatacttctttctcgcatgaattttcgaacattgaacaggaaattaaccatggctcaacctgcaagcctcacaagaataggccttgctggcctggctgtgatgggccaaaaccttgctcttaacattgctgaaaaaggcttttccatttttgtctacaaccggaccgcgtccaaggttgatgagacagctcgatagagcaaatctacgtaagaaacctttcctgtgtatgggttaccatcgacccttaatttct

SEQ ID NO: 51726 - DNA, 416 bp, Glycine max
  unsure at all n locations
  Clone ID: LIB3167-016-P1-K1-E11
cgtttcggaagcagacacagatggctcgtacgaagcaaaccgctcgtaagtccacaggaggaaaggctcctaggaagcagcttgcaaccaaggctgcacgtaagtctgcaccaactactggtggtgtgaagaagccccaccgttatcgtcctggtaccgttgctcttcgngaaattaggaaataccagaagagtaccgagcttttgatccggaagctccccttccagaggctggttcgtgaaattgctcangacttcaagactgatctgcgtttccagagccacgccgtgcttgcattgcaagaagctgctgaggcataccttgttgggctctttgaggacactaacctgtgtgccattcacgccaagcgtgtaaccattatgcccaaggatattcagctggcaagaaggattcgt

SEQ ID NO: 51727 - DNA, 250 bp, Glycine max
  Clone ID: LIB3167-016-P1-K1-E12
gatacggtgactataaaccgcggaaactttggtgaaaggtgtgagcgtcattagtgaatgaagaaacaatgctggcttcttcactctccttcctccattcttgcacataccacctatgcctcttgcttattggcaattgtacctcctaaccccaaaccctttcactcatctaccattcgacgtctgaagccaaagacacgacaccaacgtacgacaggaccgttcgccacactctcatcgaaaagaaggt

SEQ ID NO: 51728 - DNA, 245 bp, Glycine max
  Clone ID: LIB3167-016-P1-K1-E2
cgcgtacaaggctgaaacctttcttcacaaaatggccttttctacactaacaaccctctccctccgcatgctctcttatactacaccctcgtcctcttcttaccctacacacctctccgccaacccctcctccctccaattccccaacttctcccaccgtgccaccaccactcgctctgcccgctttgtcgtcgtctcccccgtcgaggcacctgataaaatcaccaatctctgctactaaatct

SEQ ID NO: 51729 - DNA, 405 bp, Glycine max
  Clone ID: LIB3167-016-P1-K1-E3
gtatgatgtcacccctttcatggaggatcattctcggaggtgatgaggttttgttatctggggcagggaaagatgcaacgagggactttgaagatatggggcacagtgattctgctagagatatgatggaaaaatactacattggtgagattgatgcatcaaccgtcctactaaaacggacctacattccacctcagcaagctcagtacaatcctgataagactccagaatttgtgatcaagattttgcagttcctggtccctcttctgatcttgggcttggcctttgttgtgcgacactacaccaagaaagagtagagtttgttcttctttatcacattggacaatggtgaagggtctgttagcttttttatagtgtcatttaaaggacaaagtttatatttct

SEQ ID NO: 51730 - DNA, 327 bp, Glycine max
  Clone ID: LIB3167-016-P1-K1-E4
cggacgcgtgggaaacaaacctcaaagttgcattccaccatgtctaaacaacccattgatccctttcgccacatcaacatagttctcaaccctaacggaaccctaaatcgcttgcgccatattcccagcaccgcaccctcttccgaccccactctcccagttctcaccaaagacatcaccatcaaccaacaaaacaacacatggctccgcttattcctcccccgaatagcactatccccaaaccctaagaagctacctctcatcggtttcttccacggcagcggcttcatcgtaaccagcgccgccttcactatgttccacgacttt

SEQ ID NO: 51731 - DNA, 296 bp, Glycine max
  Clone ID: LIB3167-016-P1-K1-E5
ctattctcctcatcttcctctttttctcatacttaaaggggttcaattctagctagttctatgtacgtcgtccgcgaccatgagcatggcgatcgcgcttctgttcatgggtttcgcagtttcatcagctttagacatgtcaataatatcacacgacaacgctcatgcggatagggccacgaggcgcaccgactaggaggtgatgtcaatgttcgaggagtggctggtgaaacacttcttggtgtacaacgttctacgagagaatgtttataggtttaaatatttttcacaagttg

SEQ ID NO: 51732 - DNA, 266 bp, Glycine max
  Clone ID: LIB3167-016-P1-K1-E6
taatcctgaggcactgaaagtgtgatatggcaagagtcatttcctcttcctgcgcacgcctcgcaatgcgcctcttctccaccaccaccacagccaccgcgttcgccgtcactttacccaaaccctcatcactctccctctcatcgcgtcgattcctcttccctctctcccatgccatcgtccctcccttcacccgcgtcgccggaatccggtgccgtgttaaccgcgccggaaactcggtgtactcacccgttgaactcggggtc

SEQ ID NO: 51733 - DNA, 368 bp, Glycine max
  Clone ID: LIB3167-016-P1-K1-E7
cccacgcgtccgcccacgcgtccgcccactcgtccggatcgagataactagaaacagtgtgatgaaaatgaaggtcctgggtttcttcgttgctacaattttggtagcatggcaatgccatgcgtacgatatgttccctctccgaatgaacactggctatggtgcccgtactccggaggtgaaatgcgcaagttggaggcttgctgtggaagcacacaacatctttggctttagaccatttctgaagagtgcgttgaaacaacaaaggaatacatccatggcgaacaatatagatcagactccaaaacaggtaaccaacaagcttacttttatgccagaaaccttgaagtccatcccaaggacacatt

SEQ ID NO: 51734 - DNA, 320 bp, Glycine max
  Clone ID: LIB3167-016-P1-K1-E8
ggctttctttattttctccttcctctttcttcttcttgtttcatcttccactgctttgtatcgctgcttgcaccaggcgagggcttcctatttctccaaagcttctgctctttcatctggggcatgtgggtatggctctttggcactagacataagtggtggacaccttgcaactggtgtggcttctctcttcaaagatggagcagtttgtggtgcctgctttcagataagatgcaagaacccaactctatgcaccatataaggtaccaaagtggtattgactgatcttaatcacaataattcaacttgattttgtgctt

SEQ ID NO: 51735 - DNA, 417 bp, Glycine max
  Clone ID: LIB3167-016-P1-K1-E9
gttgcaattgcatctgataaaaatagcattttatctaattctgatggacaaactggggctacttcaggagaaagcttgggtaaagcaactatatcaccagcacttgtgaagcaacttcgggaagaaacaggagctggaatgatggactgcaaaaatgcactatcagagaccggtggggacattattaaagcacaagagtaccttaggaagaaaggcttatcaagtgcagacaagaaagcaagcagggtaactgctgaaggaaggatcggttcttacatccatgacagcaggataggtgttttggtagaagtaaactgtgagacagattttgtctcacgaggtgaaatttttaaagagcttgtcgatgatatagccatgcaagtggctgcatgccctcaagtagagtttcttgttact

SEQ ID NO: 51736 - DNA, 156 bp, Glycine max
  Clone ID: LIB3167-016-P1-K1-F1
accacaacctccatgaatagaaaaactcattgctagcccacgaaggaacatacatttacatgaggtgcttcataaactgcgtgggcttcaaacctggcataaactttcctataacatacatactagatcagattaacaaacctctattcttttcga

SEQ ID NO: 51737 - DNA, 348 bp, Glycine max
  Clone ID: LIB3167-016-P1-K1-F10
cccacgcgtccgctcactcagtctcctgcctccctcgtggcacggctccgtgcgttggctgcataatcgtggtgtgcatatcgttatagaggtaatctattatattttcatcttcatccaattaaggcttttgttgttggtggtgactttagctgggtttgcttcctgaaacagtctcatttgtagattgatacatgtattatatgttatattaagtttgtaaaaaacccttttaatgcaacaatcttgcataatcctttgaaaaaccctgcttactatgatttggtactgaaattcgtgaagaaatgcagcgtctatttgaactgcaacaagcattaattgaagttt

SEQ ID NO: 51738 - DNA, 394 bp, Glycine max
  Clone ID: LIB3167-016-P1-K1-F11
cgagaatccaaaaggcgaagaagaataaacgaccgagcaagaaggaaatggccaccaacattgggatcatggatgcgggtgtcttcgtccgcagaactgagaatctttcttggatcaacttaactctgcaacttaatctctctcaaatctaaaagggccttgtccgggcgcggtactgtcaccttttctataccgctcatacacagatcgtgcctatacacacagtgaatttcgacacccaaagcgcgtgtgtgatgattcacaactacacggtgcttcaagatgtcttcaataaactcaaaatcaccaagcacatcgaggtcagcaagctggtgaaaggaaggccactggataacctccagttcatgcaatggatgaaacgatactgcgattc

SEQ ID NO: 51739 - DNA, 336 bp, Glycine max
  Clone ID: LIB3167-016-P1-K1-F12
gaaaggagagagagaagctgcacaccttttcatactagtgctgattgctgaaactgcgattactcgccatttgcacagagatcccaacaacacttgaaagttgaaacagaaaaacaccaatccctcatcagactgctccgttatcaattgtcgggtttaagtctgcctacgttccacttcctttgccatcacagcaagtccacactttgaacccaatcgtgacacacatggctacaccaccacaatgggaatttagctgtgacatggaaatgtattatggatcggacgagaatgcttccattgtgtatgctgccttaacagttgacaaacatttac

SEQ ID NO: 51740 - DNA, 333 bp, Glycine max
  Clone ID: LIB3167-016-P1-K1-F2
gcagactggccatgcttgctgtcatgggtgcatggttccagcacatctacactgccaccgggcctattgacaacctctttgggcaccttgcagatcctggccatgctaccatttttgctgctttcacccctaagtgaaaaggctaagatcaacaatcagattaccagctgtttgggatgagaggagtgtttatatatgtctgtagaaattaagcttgtaatatggctacttctatgtcatatatgcacataatatcataatccaacgtgccgacacctatttaagttttagatgccatggatgtaagttcaagtaataatcccatttgtgcat

SEQ ID NO: 51741 - DNA, 310 bp, Glycine max
  Clone ID: LIB3167-016-P1-K1-F3
gatgttcatcatgcctatttgttactttattcggcgcacacaacaagcggtctacatgtgctgtactacaaaggaagcctgctcctccaaaaactggttgttagtggcctgaccgtttgcctacaaaatgtatcatccttgatcattaatcaaattatgtattattatttatgttccaatctcaaaattcctttcatatttacatacctttcctttatagtattcatttttaattttatctcttttcttttatcctctatcttttcattattctttattcattttactttcttcatcttttcttttttat

SEQ ID NO: 51742 - DNA, 312 bp, Glycine max
  Clone ID: LIB3167-016-P1-K1-F4
cccacgcgtccgcaaaagcatgcgtgatattgtcagagttgctatgagtcaagcacagagaagaactaaattatctggggagacaaattttagccggattatctgttcaagaggggattctgatccttttgatggactctatgttggtgcatttggcccttatggcatggaaatagtgcatttgaggcgaaaatttggacattggaatgaagtggacaatgaaaacaaaacttcagatgtgggaatttttgaatatgtaaaggctgtgaagttaactggggatcttaatgttccttctggcctggtgacatt

SEQ ID NO: 51743 - DNA, 320 bp, Glycine max
  unsure at all n locations
  Clone ID: LIB3167-016-P1-K1-F5
gaaaaaccggggcgacgcacgcgtccgctctctcagaatttctatctatctcttgttttaatttcaacaacggttactccttttgcggggtgagtttcaatcacgccgtcgtcatntctaccgcatcgcaacccaaggccaagaaaacggcgtcgtccaagaagcccctctcccaccctcccttcgccgtgatgatagcacatgccattgcgagtctgaaagagagaaccgtgtcgagccaatactcgaataccaaatacattgaagggtaacacaacgagttgcctgcaacctacaagaatcttgttctcgttcatctt

SEQ ID NO: 51744 - DNA, 381 bp, Glycine max
  Clone ID: LIB3167-016-P1-K1-F6
gaaaaaccgggggatgccttgcttggaattcgagttggagcacggtttcgtgtaccgttagcacaacaggtcaccaggatactacgatggacgctactggaccatgtgggagctgcctatgtttggttgcactgatgcttctcacgtgttgaaggagcttcaagaggctaagactgcataccccaacggcttcatccgtatcatcggattcgacaacgttcgccaagtgcagtgcatcagcttcatcgcctacaagcccccatgcttctaagtgtgaaaaatttgcaaagcaattgtagccgccaccccactttgtttgtttgtacttaaactacattcccatttgtttttgctttttgagattttcatcatccctgtctt

SEQ ID NO: 51745 - DNA, 164 bp, Glycine max
  Clone ID: LIB3167-016-P1-K1-F7
gtggacaacgaaatttctcagccaaagatcattgatcaaaatcgtttaatcaaattctgtaaaaattgcactaatcttccgtggaaaaacaacacttaaccctaacccccctttttacattccccccccctttcccccaattgaagaatttttttccaaaatgt

SEQ ID NO: 51746 - DNA, 384 bp, Glycine max
  Clone ID: LIB3167-016-P1-K1-F8
caaaaaaaaaaaaaaaaaaaaaaatttttttaaaaaaaaaaaaaaaaaaaaaaaaaaaggggaaaaaaaaaaaaaaatgggggggaaaaaaaaaaaaaaaaaaaaaaaaaaaaaaaaaaaaaaaaaaaaaaaaaaaaaaaaggggcgccccttttaaaaaacccaatttttttttccctttcttccaaattatttatttttttttagtgcccccaaatttaaatttattgccctggtttttacacctattttcactttgaaaaaccttttggtttccccaattttatatctcttgtttacaaaattccctttttcctcctttttgttttataataccaaaatagccaccctaccctttatcctcctttttccaaataattttcc

SEQ ID NO: 51747 - DNA, 364 bp, Glycine max
  Clone ID: LIB3167-016-P1-K1-F9
gtttcggaaacccgcggcgacccacgcgtccgggtttagttctttctgtatgggggtttttttccttcatggttacaggtagcattgcggcactaatgtttgggatagtgtgaggtagcgaccttttggctctaggtgtttcaagtctccgggcatacaaaagaggacaaccttcttctttaatgctcaaaggccaaactgcaatagcaagtatattgtttttgcgggagataagattgctagctgcagaggggtcaccacttgtaacttatttcacttcattgatcagtggtgcagtagtggcattttatgtctacagattggtactggaacataaaccaaaaaatgcatcaaacttggaaaa

SEQ ID NO: 51748 - DNA, 407 bp, Glycine max
  Clone ID: LIB3167-016-P1-K1-G10
cccacgcgtccgcttgctgcggttgctccaccacctaatcacttcccctgtaaatcacgtttagttcgcacaaggttttaaaaaatggctgatgctgaggacattcaacctcttgttgttgataatggaactggaatggtcaaggctggttttgcaggtgatgacgctcctagggccgtgttccccagtattattgggcgaccacgccataccggtgtaatggttgggatgggtcagaaggatgcttacgtgggtgatgaagctcaatcaaaaaggggtatactcaccttgaagtatcctatagagcatggcatagtcagcaactgggatgatatggagaagatttggcatcacacattttacaatgagctttgtgttgcccctgaaaaacaccctgtactttttac

SEQ ID NO: 51749 - DNA, 423 bp, Glycine max
  Clone ID: LIB3167-016-P1-K1-G11
ggcaaaagctttctggagggaaagacaataaaaggaggcctagtatccatgatatcaccattgttaatcttacatcagatcaagagaagcctcttttactcaatgatgagtctcacatgacttttgagcaacagaagctaactagcatgccaaaagtacaactagaatggattaatcaccacgacaatgggtcacgtatggttgtcaacccaaattatgatatgttcatgtcaccttcatctggcatctcttccaagaccctcaagttgcaagggcaagatttctatgaatgtgcctttcatgagacttatgctaagcttaaaaattcgggtttcaggacaacttctagagacttcaacaaggaaggtattcatgcactctgatcttgttatgaacagcataccggttctactacatagatca

SEQ ID NO: 51750 - DNA, 152 bp, Glycine max
  Clone ID: LIB3167-016-P1-K1-G12
aacccgcggcgacccacgcatccgcccacgcgtccgcccactcgtcctttcctgcttcccgacttcgtgcatatatgcgtggaaataaataacatatttctccgctcctcaaaaataaaaactacttggctaaaaatttactttctctcctt

SEQ ID NO: 51751 - DNA, 387 bp, Glycine max
  Clone ID: LIB3167-016-P1-K1-G2
ggggccgacgccacgcgtccgcccacgcgtccgcccagaactagatctagggtttattttccttttcattttgaatttgaagagggttttgcgtcttcaaagaggtaggatgggagaattgaaagacactgaggcttacgaggaagagctcatcgactacgaagaggaagaagaaaaagctcccgattctgctaaacccgttgctgaatctggcaagaagggttatgttggcatccatagttcgggatttcgagacttcctgttgaaaccagagcttcttcgagccattgtggattcaggatttgagcatccttcagaagtgcaacatgaatgcatccctcaagcaatcttaagaatggatgtcatttgccaagcgaaatctgggat

SEQ ID NO: 51752 - DNA, 429 bp, Glycine max
  Clone ID: LIB3167-016-P1-K1-G3
ccacgcgtccgcccacgcgtccgcccacgcgtacggtaagcagttgctaccctaacctcgtcttcctctctactaatttcaactatggccgacggagctgtggttgttccagatcccacccagatcgatgtcaagctctttaaccgctggagcttcgaggatattgaggttactgacatttcactggctgattacattggagttgcggcatccaagcacgccacatatgttcctcacaccgacggaaggtactccgtgaagcggttcacgaaggcgcactgccccattgttgagaggctcaccaactctctcatgatgcacggtagaaacaatggcaagaaactcttggctgttaggatcatcaagcatgctatggagattattcatttgttgactgaccaaaaccccattcaagttattgttgatgct

SEQ ID NO: 51753 - DNA, 283 bp, Glycine max
  unsure at all n locations
  Clone ID: LIB3167-016-P1-K1-G4
cccacgcgtccgcccacgcgtncgctagtttcatttttggagctttaagccattgttcatctcttctcatttgtgtccactgtaagagggtgttgtgttgggttaccctctctctccatctgcattgtttgtggctgtcagtgttatcatacaaggtgttgtatggtttcattttgtgaaactcaacaaattgattaagctttctgggacttaccttttcaccttgcagttttccttggcttttgcaagtgctgaagaagttgggggagaaactttgacaacc

SEQ ID NO: 51754 - DNA, 409 bp, Glycine max
  Clone ID: LIB3167-016-P1-K1-G5
tctcacttgactcgattgcaagtgatccacgacacactgttcgcttcacaaaagcttcgaatccaattcctcagtaacatctgcaagaagtcttctccttcaccatgccaccaaagcctttagactatgggtcaataaatgaaaacgtgaagaagagtcaatatgctgtcagaggtgaattataccttcgagcttctgagcttcagaaagagggcaaaaagattatatttactaatgttggcaacccacatgcattgggacagaaaccactgagctttcctcgtcaggttgttgctttgtgccaagcttcattcctacttgatgatcctaatgttggactgctattccctgctgatgcaattgcaagagctaaacactatctttcattgacctcgggcggtttaagcgc

SEQ ID NO: 51755 - DNA, 289 bp, Glycine max
  Clone ID: LIB3167-016-P1-K1-G6
gaaaaaaaggggcgaggcacgcgtccggacatggccaccgtcacttctgcagcagtttttattccctcattcactgacctcaacggacgcgcatgcaaagtgagttcgtccgcaattaaagtctcagctccccaagccacaaggttctgcggcatcaaggcttccctcaaagacgttggagtcgctgttgtggccactgctgcgagcgcagttctagctagcaacgccatggccattgaagtgttactgggcactgatgacgggtctctggttttctctcccaactctt

SEQ ID NO: 51756 - DNA, 343 bp, Glycine max
  Clone ID: LIB3167-016-P1-K1-G7
gtttcggaaacccgcggcgacccacgcgtccgcccacgcgtccgatgatcagtcaaaattttctggaactggggctgcaattgaatattcgaatatacataaataaggtgtggtagattgaagtcattggacacagtgcttgtggtggtattaaggggcttctgtctttcccatatgatggaacctactctactgattttattgaggagtgggtcaaaattggcttgcctgcaaaggcaaaggtgaagacacagcatggggatgccccttttgctgaattgtgctcacactgtgagaaggaatctgtgaatgtttcccttggaaacctgctaacttacccatt

SEQ ID NO: 51757 - DNA, 61 bp, Glycine max
  Clone ID: LIB3167-016-P1-K1-G8
aaaaaaaaggcgggacccacgcaaccacccacacaaacaaacattcaaaatttttttaaaa

SEQ ID NO: 51758 - DNA, 388 bp, Glycine max
  Clone ID: LIB3167-016-P1-K1-G9
cccacgcgtccgacagtgtgatgaaaattaaggtccttgttttcttcgttgctacacgtttggtagcatggcaatgccgtgcgtacgatatgttccctctccgaatgaacactggctatggtgcccgtactccggaggtgaaatgcgcaagttggaggcttgctgtggaagcacacaacatctttggctttgagaccattcctgaagagtgcgttgaagcaacaaaggaatacatccatggcgaacaatatagatcagactccaaaacagttaaccaacaagcttacttttatgccagagacctcgaagtccatcccaaggacacatttgtgttcagtatagatggcaccgtactctctaatattccatactacaaaaaacatggata

SEQ ID NO: 51759 - DNA, 317 bp, Glycine max
  unsure at all n locations
  Clone ID: LIB3167-016-P1-K1-H1
aaaacccnnnttcatctgtatccaacgatttactanaacgacgtcgcaatttctccatcttcacatttctctttttctttaaatcaaaagttatatacactttctcgcgacacgaaatattttgaaccaatcaaaatatctatggcttactaaccattatatccaatatctctcgcttataaattagtttaaaaattattacatccagcttgctttaaactcaattcttatccttttaacaattgcaccttctctttttgattaataaacccttcgaaaatttaattcatttttaaattaataatattattattatt

SEQ ID NO: 51760 - DNA, 414 bp, Glycine max
  Clone ID: LIB3167-016-P1-K1-H10
gaaaacccggcgcgacccacgcgtccgcccacgcgtccggaagtgagaagtttatctcaagggtcaaaaagagcacaggttggtcatgacatcttcattctcggcgcagttggtgcaaagtcagaacctacctcctcgttttcatcgccatgtccaggggaattttagccaagatgtgtcaaaggtttcaatgacacatgtggtccgtagcagtaccaaatcacagcttggttacggtaaaacgttggcatcaagatctcactatgctgccagattttcagtctcacgacaatctgaagcaaaatcaatcacatataggagaatgacatgtactaatgctaaagaaaatgttctacaactggaagcccaagtgacaaaacaagtgctttttttgatgtgaaaaattggggggtg

SEQ ID NO: 51761 - DNA, 359 bp, Glycine max
  Clone ID: LIB3167-016-P1-K1-H11
gttccttggggctggagaggctggtactggaatagcagaactaatagctcttgagatgtcaaagcagacaaagacgacctatagaggagactcgaaagaagatatggcttgtagactcaaagggtttgattgttggttcaagaaaggcttcacttcaacacttcaagcagccttgggctcatgagcatgagcctgttggcagtctcctagaagctgttaaggtaatcaagcctacagttttgattggatcatcaggagtgggaaaaacatttacaaaggaagtaattgaggctgtgacttctatcaatgaaaaacctcttgttttggccctctccaatccaacttcacagtctgagtgt

SEQ ID NO: 51762 - DNA, 282 bp, Glycine max
  Clone ID: LIB3167-016-P1-K1-H12
aatttctctttctctctttttttgtgtgtccaaaatggctcctagttctactcacaacaatgggttctatgtgcttatgctagttgggatagtggttagcgctatggttgctatttgtgctgctagcttctaccaagactttgatccaacatgggttggtgaccgtgctaagatattcaatggtggccagcttctatcactttccctagacaaagtctccggctctggcttcaaatcaaagaaagaatacctatttgggaagattgatatgcagctcaagct

SEQ ID NO: 51763 - DNA, 357 bp, Glycine max
  unsure at all n locations
  Clone ID: LIB3167-016-P1-K1-H2
ccacgcgtccaaccacgcgtccgatccaggtatggcttctaaactcatcttgaacgaactcaaagatttncccgtggatccttctacctcatgcgttgcaaaccctatnnctgaagacatctttcacttgcaagccacaatcattggacctgctgatatcccatatacacgtggtgtttttctaatttcaattcattttcctcctgactatcccttcaagccaccaaaagatgcttttcttactaaagtgtttcacccaaacatcaacatcaatttcagtatatttctttacattctcaaggagcaattggaacccaaccctaaccatttccaacgtcctttttttcaaatttcctc

SEQ ID NO: 51764 - DNA, 157 bp, Glycine max
  Clone ID: LIB3167-016-P1-K1-H3
cacttcaaaaagacagtgcttacaacaccacaacaaccaccatccgtcaactttataacattgcctgctcaacacaattcaccaatccatatcgcacatgccacccaaaacctaccccttctcctactcctacatcacgaaagtgcccttcttacac

SEQ ID NO: 51765 - DNA, 360 bp, Glycine max
  unsure at all n locations
  Clone ID: LIB3167-016-P1-K1-H4
gggaaggaagggcgggacccacgcgtccgtgaatgcgctctatctctctctttcgatctgggtactaaccctaacccgcttcgaaccgtggcttcctcaggctcgcagagcgctctctcgaagaaaaccttcttcttcttcgtcttcgtcttctcaacaaacacccgggtcgacccggatcgtttaccgagaatctcggatcccatcggaatccgatttcccgatctggcagcagaactggttcatcgcattgctcttcgtcatggctctcggattcttcgccctcgccattttcctcttcctcactctcgactctgacatcgctcctttttacaccggcttcgncttcggcttcgccgg

SEQ ID NO: 51766 - DNA, 251 bp, Glycine max
  Clone ID: LIB3167-016-P1-K1-H5
gccgaaatggctagcatatggtgagataatcaatggtcgttatgcaatgttgggtgcagttggtgcaatagcacctgaaattctaggcaaggctggtctgatccctcaggagacagcactcccatggttcagaacgggtgtgttcccacctgcaggaacctacaactactgggcagactcctacacactgttcgtgtttgagatggcactgatgggatttgcagagcacaaaagattccaagactgggcca

SEQ ID NO: 51767 - DNA, 455 bp, Glycine max
  Clone ID: LIB3167-016-P1-K1-H6
gactggaacgaatgcccgacccacgcgtgcgcccacagactgtccgatttgccgtttatttatttatccataactgagccaacgtcgaccatcatcattacacatcataggcggtctctctagggtatgatcagactcacgggtttaagccatgggaaaaaggaaggcaaaggcaaagcctcctccaaagaagcgaatggataagctcgataccgtcttcagctgccctttctgcaatcatggcagcagcgtcgaatgccgccttgacatgaagaacttgataggggaagctatttgcgggatatgccaagaaagctttagcactaccatcacaagtttatttctatgggatgtgtttggcatttgagatattgactgtgagggaagcaaagacgttccaaagggtttatcttggctggcaatggatattgaaatgggaaagagctagtttattt

SEQ ID NO: 51768 - DNA, 177 bp, Glycine max
  unsure at all n locations
  Clone ID: LIB3167-016-P1-K1-H7
tcatacacctcatctcgtctcacctcanggtttgtgaaatcgccagtgagtgctaggaatcccttgaggaaagctgtggcaatgggaaatgggagggttacatgcttcgagaggaattggctgcgggcagattacagtgtcattgggtttggattgattggttggctagcaccctca

SEQ ID NO: 51769 - DNA, 189 bp, Glycine max
  Clone ID: LIB3167-016-P1-K1-H8
ctaaaagaacggtttgaggagtacgtaatgattgggagagataagaaatccatccagtgcgagctagatgataagatatgggaggcattgaaggttccggtgtcagtgtgatccatttatatccaaaacaattatcagacaagactttaagattttttggtcgctcaattcaaatgatgtgcattgaag

SEQ ID NO: 51770 - DNA, 392 bp, Glycine max
  Clone ID: LIB3167-016-P1-K1-H9
ctcatcattgactcaataaccttctctttttcaaaacctacaacaacaacaaaaagcgagaaattttttagaacagtcgtggcatcaaaaatgaagtttttcttggttttggtgattgccatgttggcgatggtagcaactggggtttcagctgctgaggcacctgccccaggtccttcatccgatgccaccaccttctttgtacccactgctcttgcttctctctttgttcttgcatttggccttctcttctaattaattcttcaacaacctttggttatttgttacattacatatatggaattcactttgttcagacgtggttgtgttttgtgtttcgttcttctctttttttccaactcaacttgagtagtggttggacactactctct

SEQ ID NO: 51771 - DNA, 434 bp, Glycine max
  Clone ID: LIB3167-017-F4-F2A
gcaagttaaaacacgagtacttaaacttagcaccactaaaattatccgatgttgcaaagcacttgaaacataaatgtcaataacaagaaatactagccaaaaaatactcatccaacaaaactgtagaacgatgaaaaattctgtccaacctatcatgacaatatattaagtgcaatcagaaattcactgaattttaagaaccactactcaaaagacacggtacgatttccccatggtactcttcagatataggcagcgaacgttctgccaattctttttcagcaaagagacaaggaagttaacactcagttgtacattttggaagatttgcttttcctccatgctaacattccccacagctactcccatgcagagaaccttcttaagctggaacttgaccatggccttggtctcattaacctttgactcgagag

SEQ ID NO: 51772 - DNA, 455 bp, Glycine max
  Clone ID: LIB3167-017-F4-R2A
tagatctgtacccgcctagccattgatttggaaaagtccaacttcaaggatgagtaagcttcagagtgatgctctaagagaagctatctcaggaatcatggctgattccaaggaaaagaacaggaaatttgtggagaccattgaactccaaattgggttgaaaaattatgatccccagaaggacaagcgtttcagtggctctgttaagttgcctcatattcctcgccccaagatgaagatttgtatgcttggagatgcccagcacgttgaggaggctgagaagataggattggactacatggatgttgaggccttgaagaagcttaacaaaaacaaaaagttggtgaaaaaactagccaaaaaatatcatgcctttttagcctctgaagcagtcatcaagcagattcctcgtctcttgggacctggtctcaacaaggcagggaagttccctacac

SEQ ID NO: 51773 - DNA, 244 bp, Glycine max
  Clone ID: LIB3167-017-P1-K1-H8
atctctgttgatttgatgcaccatgggcatggctgtcatttcacatgttattacacattgttccactacattggagtgattatgtttgatacttatgggaatacatatattataacgggtgtgtataatacaaaaaatatatacttatacaaataaatagggggggtttttttatatgatccaatcttatttacgcgtgcttgctaatttatttattttttatagtttcacttaaattcaattt

SEQ ID NO: 51774 - DNA, 276 bp, Glycine max
  Clone ID: LIB3167-018-P1-K1-A1
cacgcgtccgcccacgcgtccggttgcgcaacaggtcaatactgccgttcatgtgccggaggcggatgctctgacctgttctagtatcatgaaacccgactaacacatgcaatagctgcagagacacgtgcataacctagtggatcatgaggaacaacgtgcattgctgcttgatttgctacaataggcagaggtgtatgaggacgactgcacatagcttggtgaaacaccactatgtgtgaataccttttcaagttcgtgcaaaagattttacaa

SEQ ID NO: 51775 - DNA, 371 bp, Glycine max
  Clone ID: LIB3167-018-P1-K1-A10
gccagccataacagttaagcaaattttcgtgggcatccaagacttacttgggcagccaaatcctgctgaccggtgcccagacagaaggctatcatctattcatccaggatgcagcagagtacaagagaagggtccgccagcaggcaaagcaatatccacctcttctctagggttgcatcagctaaatttatgaactatttttactatggcagatgtttcttcttttgtcccgtgttaaaactgtgttgtcattgtgattaatggctgccataacattaaacatgaatgttttagctatttatgattactcccatatctggaagaagtgttaatatataaaaaaaatgtgaaagtcaaccaatgaatacttg

SEQ ID NO: 51776 - DNA, 374 bp, Glycine max
  Clone ID: LIB3167-018-P1-K1-A11
agcattagcaaaagcaagaagaactagtctaagcagaaatggcctcttcagggatggcatctgtggccctcaaacctgcccctttcactgttgagaagtcctcagttagaggccttccctccctctcaaggaactcctcttcattcagagttgtggccagtggtggcaagaagatcaagactgacaagccttatggaattaatggtggcatggctttgagggaaggagttgatgcatctggcaggaaaggaaagggaaagggcgtttaccagtttgtagacaaatacggtgctaatgtcgatggttacagtcctatctacgacaccaaggactggtctccaaccggtgatgtctacgctggcggtacgactggc

SEQ ID NO: 51777 - DNA, 372 bp, Glycine max
  Clone ID: LIB3167-018-P1-K1-A12
cccacgcgtccgcaagattcaggtactgcgtttcggaagcagacacagatggctcgtacgaagcaaaccgctcgtaagtccacaggaggaaaggctcctaggaagcagcttgcaaccaaggctgcacgtaagtctgcaccaactactggtggtgtgaagaagccccaccgttatcgtcctggtaccgttgctcttcgtgaaattaggaaataccagaagagtaccgagcttttgatccggaagctccccttccagaggctggttcgtgaaattgctcaggacttcaagactgatctgcgtttccagagccacgccgtgcttgcattgcaagaagctgctgaggcataccttgttgggctctttgaggacact

SEQ ID NO: 51778 - DNA, 377 bp, Glycine max
  Clone ID: LIB3167-018-P1-K1-A2
cgtccgggcctttggtttgacccccttggttggggaaccggttctcctcagaagatcaaggacttgagaactaaggagatcaagaatggcagactggccatgcttgctgtcatgggtgcatggttccagcacatctacactgccaccggtcctattgacaacctctttgcccaccttgcagatcctggccatgctaccatttttgctgctttcacccctaagtgaaaaggctaagatcaacaatcagattaccagctgtttgggatgagaggagtgtttatatatgtctgtagaaattaagcttgtaatatggctacttctatgtcatatatgcacataatatcataatccaacgtgccgacacctatttaagtttt

SEQ ID NO: 51779 - DNA, 382 bp, Glycine max
  Clone ID: LIB3167-018-P1-K1-A3
gaaataacggggcggaccaacccgtccggatggctttaggtgttcctgctctttcgttgacatacgtggctcacgttctggcagttgttgccagcgtcttggtcgtggtctgggtcgtcaatttcaggggtggcttggcttgggattctgataacaagtccctcatcttcaacattcatccagttcttattgttattggcttactagttcatgggggtgaagctattataagttacaaagcttttcccctaaagaaggaagtgaagaaattgatacaccttgttttccatgccatcgcattaatacttggaatagttggaatttatactgccttcaaagttcacaatgaaagtgggattgccaatctctacagcttgcattc

SEQ ID NO: 51780 - DNA, 359 bp, Glycine max
  unsure at all n locations
  Clone ID: LIB3167-018-P1-K1-A4
gggcgacccacacgtccggcttggaattcgagttgtagcacgtttttttgtaccgtgagcacaacangtcaccgggatactatgatggacgcgagtggaccatgtggaanctgcctatgtttggctgcactgatgcttctcaagtgttgaaggagcttcaagaggctaagacttcataccccaatggcttcatccgtatcattggatttgacaacgttcgccaagtgcagtgcatcagcttcatcgcctacaagcccccaggcttctaagtcattgaaaaatttgcaaagcatctgtagccaccccactttgttttgtgtacttaaacctcattcccatttgtttttgctttatgagat

SEQ ID NO: 51781 - DNA, 236 bp, Glycine max
  unsure at all n locations
  Clone ID: LIB3167-018-P1-K1-A5
acccacacgtccgcccacgcgtccggttaggaagtatgttaacacctaccgtcgtacatttaccacagaagcttttaaaaaggtgatgaaagctcccaanatacaaanactggtcactcctcttacgctccaaagaaagcgggcaataattgctgataagaagaagagttatttccaaggcaaaatctgaggcaacagattaccataaactccttgccttcaggttgaatgagcat

SEQ ID NO: 51782 - DNA, 146 bp, Glycine max
  Clone ID: LIB3167-018-P1-K1-A8
ccacctcggaaaaaattcaagacactgggtggctttaccgacgtaccgacacaggggggtatcaaaattctcgctttgtgtgaaacacacaaaaaaatgcagttggattggaggggtaggaaaacaagggtttggactgactatta

SEQ ID NO: 51783 - DNA, 346 bp, Glycine max
  Clone ID: LIB3167-018-P1-K1-B1
cccacgcgtccgacactttccacttgtctccgaattagttatcttgagaaacattattcccattgctatatattatggctagcatgaaggttacatgggtggttgtgatcatgtgcatggccgtggtgggtgcaccgatgatggcgcaagccatgacatgcaatgatgtgacggtgaacatggcacagtgcctatcctacctgatgcagggaggaacaccttcaacactttgctgcagcggagtcaagaacattcttggctctgctgtcaccaccgttgacaaacaaactgtgtgcaactgtcttaaggcggatgctgctaggtacaacatcaatgaccagtatgc

SEQ ID NO: 51784 - DNA, 266 bp, Glycine max
  Clone ID: LIB3167-018-P1-K1-B11
atctacaacccggccaaaatccctgtcttttcaagagagagcctcaagcagaatgctgatgttgacacagaggaattacctgcaaccccactgttactggctagagcactcatatacatatctgtatttcattcaagggaagaccttatcaaagccttgctcgttattagcaaagtgggagatcttgctggcataaaatatttccctgctgaaccaacaaaccagcaacaagggggtaaatctgcgaagtttgattgagtgagaac

SEQ ID NO: 51785 - DNA, 275 bp, Glycine max
  Clone ID: LIB3167-018-P1-K1-B12
cccacgcgtccgcccacgcgtccgcccacgcgtccgagagaaagcaagctgaatggaggtgttgcagttgctggcttccgattttaccctccgccattccctttccaagcccaccgtctcccttcctcccactcactcactctccgtcgtcgtgttccggcggcggagatcaccctgcggcgggcggtggtgggctccgcgagcatgcgcggtggaggtgttggagtcggagggagggaagatggtgatggagctggtgggagcctttaactagt

SEQ ID NO: 51786 - DNA, 317 bp, Glycine max
  Clone ID: LIB3167-018-P1-K1-B2
gcaccattcatgatgaatcatgttctagttttcatcgaggaataaaggcaagctctattttgagccaagtgaaacatctatcttcctggctaagttctttgaataaaagtctgaatgtgtcatctctatgctacaaagtttatgattcagatcaggtggactctattcgaatgatggccatcttgcacgtcctgatcatattgtgttcaagcgacggacacatccaaacaggaaagatgagatttgaaactgtgatgccaagtgaatgcgaaaagtacagtccatttttagcgatttttttaaattattcgttgatt

SEQ ID NO: 51787 - DNA, 247 bp, Glycine max
  Clone ID: LIB3167-018-P1-K1-B4
cccacgcgtccggaaagttacaagtttcttcttctcaaggaataagaaaccatccagagaaaaatcttgtctatgtcaatctgttgatgaatcccaatccactgccattgaaacatcacattctccagtcaattcatctatagcccttagggatgatgtgtctcaaagcttcgacagcggatccatcggagagtgttttttttcagctccatatgaattatcaggcctatttttttcagattctatc

SEQ ID NO: 51788 - DNA, 277 bp, Glycine max
  Clone ID: LIB3167-018-P1-K1-B5
cccacgcgtccgcccacgcgtccgcccacgcgtccgcatccatcaccctttcttgcattctgttgggaaatggagggcacactttcagcgtgcaagtccattagctcgccttctgttcccgtcgcagctttatttgcggggaaagcaggaactaagagttcgcaatgcagttttttagctggagcaaacaaagtgagggttcctaggcaagttggtcaaggtagccacgttcgcaaacagctccaatctcttcactgtggtgctttctccctcgact

SEQ ID NO: 51789 - DNA, 191 bp, Glycine max
  Clone ID: LIB3167-018-P1-K1-B6
cccacgcgtccgcccacgcgttcgttgacttctacctgataagaggtcttgggatttttattaataaatacattggcgataatcaccagtgatgttgctgcacttattgatgaatatgcacgtagagcttttcaggagctcaatcatgtgcatgagggacaaaatgcattgagatacaaaaaattgtatgc

SEQ ID NO: 51790 - DNA, 281 bp, Glycine max
  Clone ID: LIB3167-018-P1-K1-B7
cccacgcgtccggtctaagagagagagagatggcatcgttttgtgctgcaaggactttcaacattccggcgatgaacgccggcgttcttcgccgccgggcatcgtgggccgccggaatagtcggagcctcggtggccggcgctgcacttttgcgctcttgttcgtctaagcgctctgcgccattcgcttgcatgagcctctctactgataccagtttaaaggaagctgttcaaactgaaaaggccccagcggcattggggccatactctcatgcaatcaaa

SEQ ID NO: 51791 - DNA, 324 bp, Glycine max
  Clone ID: LIB3167-018-P1-K1-B8
gatagacaaagtccaacacaagttattacagaaatatgtgggtttgtgaccattctatcaggaacttttcttgtgtgacaaaactaaggatatggctgatggtttacaaccatctttatctgttagacttcctaagcattcagaagaggatggctttgatggtggtgaaggcattcctcttagacggcaagaagtcatgagatcgccatgatatatcctttgcattacattttgctattctaaatgagcttgaggcgtttgggagggaattttgcaaggttgttttgtatttactgaatatttttttttccccatttttttttt

SEQ ID NO: 51792 - DNA, 302 bp, Glycine max
  unsure at all n locations
  Clone ID: LIB3167-018-P1-K1-B9
cccacgcgtccggaagatgaagaatattagtagtagcaacaataataataggacggatggtctttcttccatcatgaatggaggaggctcaggtggttgtagatctgagcctggttccaaggaatgggagatgaggccaggtggaatgctggttcagatgagaactgctgactctgatcggaacccagcacttgtgcccacaattagagttagggtcaagtatggttcaatttaccatgaagtcaacattagttcacaagctacattttgggagttgaagaaaatgatggatgggncaactg

SEQ ID NO: 51793 - DNA, 353 bp, Glycine max
  Clone ID: LIB3167-018-P1-K1-C1
cggacgcgtgggcaaggccatcatcatggcagctgcttccccaatggcaagccaactcaagtccaccttcactaggactcttgtagctcccaagggcctctctgcctcttcaccacttcacctcgtgccttctagaaggcaatttagcttcactgttaaggccatccaatcagagaagccaacctatcaagtgattcagccaatcaacggtgacccattcattggaagcctggaaaccccagttacatccagccctttgatcgcatggtacttgtccaacctgcccgcatacagaaccgcagtgagcccactactaagagggatcgaggtgggcctggcccacggataccttt

SEQ ID NO: 51794 - DNA, 351 bp, Glycine max
  Clone ID: LIB3167-018-P1-K1-C10
gtttgaacacaggacttgtatggattgggagccaggagacttggagtgacttcactcccttcattgggttgcctacctgctgcaaggactatatttggtttccatgagaatggttgtgtctcaagaatcaacactgatgctcaaggatttaacaagaagctcaactcagctgcagcaagtcttcaaaagcaacttcctggtcttaagattgcaattttcgacatttacaagcctctctatgaccttgttcaatccccttcaaaatctggtagacaatactttgacttaaattaattaattattcaacataggtcctgtttggataagtttcttcatgagcacttataatag

SEQ ID NO: 51795 - DNA, 354 bp, Glycine max
  Clone ID: LIB3167-018-P1-K1-C11
caagaacaagaacaagaactaatagaagggttcgggaagaagagaaggtggtggtctgatgaagatagagaatttgaggataaagaagaagaagtagtagaagaaacttctagtgggattttggaagatgccattgacagtgtctggtttctccagattttcaaatcctatggttggacgctgcctgtcatcctcatgtcatggttgatatctagtggcccaaaagctttcctcatggcattaattcttccccttggtcagtcagcacttgcactagcatttgagaaattatggggaccgtccgaacgcaaaccaaaacgcatgtacaggatgttgaggaaaccccttgttaga

SEQ ID NO: 51796 - DNA, 369 bp, Glycine max
  Clone ID: LIB3167-018-P1-K1-C12
caaatcaaagccatggccacctccaacttctctattgttctctccgtctccctagccttctttttggtgctacttaccaaggcacactcgaccgataccgtttctttcaccttcaacaagttcaacccagtccaaccaaacattatgctccaaaaagatgctagtatttcatcctctggggtgttacaactcaccaaagttggcagcaacggcgtgcccacctcgggatctctcggtcgtgccctttacgctgccccaatccagatttgggacagcgaaaccggcaaggtagccagctgggctacatcctttaaattcaacattttcgcacccaacaaatcaaactcagctgacgggcttgcctttttt

SEQ ID NO: 51797 - DNA, 344 bp, Glycine max
  unsure at all n locations
  Clone ID: LIB3167-018-P1-K1-C2
cacatctataaataaatcttccaaggttgcttatccattcaaactgaacaagaaagatgaagcattccatagcctccggataaaaatgaagaatactatcttctctgctctctttctactttgtgccttcaccacctcatacctaccttcaaccaccgcggtggtcgataccgacggtgatattntttagaattctggnacatactatatcttgcccgccccccgcttctgaggtggagtagaattcgccgccactggatacgaatcttgccctctcactgtcttgcatactctctttgggtggtggctttcctccattttatcccacatgttctaatcccttt

SEQ ID NO: 51798 - DNA, 374 bp, Glycine max
  Clone ID: LIB3167-018-P1-K1-C3
cccacgcgtccggaaaatgtcttgctgcggtggtaactgtggttgcggaagcgcctgcaagtgcggcaacggctgcggaggctgcaagatgtacccagacttgagctacaccgagtcaaccaccaccgagaccttggtcatgggagtggcaccagttaaggctcaattcgagagtgctgaaatgggtgttcccgctgagaacgatggctgcaaatgtggagctaactgcacctgcaacccctgcacttgcaagtgaggtgttggagagctaaagcttcaagcagagatggcccttagaaataatgataaaaactatatgtagtttcaaaacttcaaaattatgtagtatgtattatgttgcactctggtgtttt

SEQ ID NO: 51799 - DNA, 146 bp, Glycine max
  Clone ID: LIB3167-018-P1-K1-C4
aaaacgccaagggaaaatgtcctgggattgaaaaaactgaagaagccaaaacaccgggaggtgtgtcaacagaaggagacaccccaaaagcaacccagacgagagctacagagagccaaccaccaccgaaaccctggtcaggggaa

SEQ ID NO: 51800 - DNA, 263 bp, Glycine max
  Clone ID: LIB3167-018-P1-K1-C5
ctttttcaacaaacctatactctttatttaaatacgacggcagccacggcaaccacggccctttattaaaaccgggaaccctcattcttcaacggaaagcccgtcacatattcttcccaagacacgcccaccaccaaattatcctcatccaaacatagcacaaaatccatgcccccaaccccaccccccttctacctccaaaccttcaaaattcaccccttcaaagaatccatcatttcacgggacaacgacccgcccccaac

SEQ ID NO: 51801 - DNA, 318 bp, Glycine max
  Clone ID: LIB3167-018-P1-K1-C7
attatatatgtgtaggaaactatttttactgggttaccaccgaagcgctaagaagtgcatggagaaattcgagagtgtgtacaagtaccacaaaagaaccaaagagggcagaagtgggaaacacgagggaaaaacctacaaattttttgatcaattacaagctcttgagaatcaattcacatgttttttttactcgtcaaaaccatcaatctacttttgtttcagcatcttcattaacatacactttttcatttaccactttttttcatttcaaattgttttttcacctaatcccccacttgctacataaattttttt

SEQ ID NO: 51802 - DNA, 281 bp, Glycine max
  Clone ID: LIB3167-018-P1-K1-C8
tctatctatccatctatcttttctatcatggctgctgggactggactctttgcggagattttggatggagatgcgtacaagtactatgctgatggagtgtggaagaaatctgcttctgggaaaagtgtttccatcatcaaccccactaccagaaagactcaatacaaagttcaagcttgttcacaagaggaggttaataaggtcatggacttagcaaaatctgcacaaaagttatgggcaaatgaccccactattgaaatcctgctgagcttctttacaag

SEQ ID NO: 51803 - DNA, 126 bp, Glycine max
  Clone ID: LIB3167-018-P1-K1-C9
ggggaccgtcaagccggaaatttttctcttaccctcttgcggcacacataagggtcagttctacgatctgagggagctctttcggataggaggaaacgctcccgttactaatttcctgtttatggg

SEQ ID NO: 51804 - DNA, 376 bp, Glycine max
  Clone ID: LIB3167-018-P1-K1-D1
agagtttgttgtgagctataagctagtttatcgtgaggagaatatgaagttgtttgttttctttgttgctgcagtagttttggtagcatggccatgccatggcgcaggctaccaaaggttccctctccgaatgaaaactggctatggtgagcgttcttcggaggtaaaatgcgcaagttttaggcttgctgtggaagcacacaacatccgagcctttaaaaccattcctgaagagtgcgttgaaccaacaaaggactacattaatggcgaacaatttagatcagactctaaaacagttaaccaacaagctttcttttatgctagtgaacgcgaagtccatcacaactacatatttatattcggcatagataacacc

SEQ ID NO: 51805 - DNA, 337 bp, Glycine max
  Clone ID: LIB3167-018-P1-K1-D10
gatcaccctaaccttgtgaagtttattggattttgtgctgagggagagcagaggctattagtttatgagtacatgccattaggatctttggaggaccatttgcttgatattcggccaggtagaaaaccacttgattggaacacaagaatgaaaatagcagctggtgcagctaggggtttggagtatctgcatgataaaatgaagccttctgtaatatatcgcgatttgaaatgttctaacattttgttaggagagggatatcatcctaaattgtccgattttggcttggcaaaagtaggcccaataggtgataagacccatgtttaactagggttat

SEQ ID NO: 51806 - DNA, 233 bp, Glycine max
  Clone ID: LIB3167-018-P1-K1-D11
tccattttttcttcagcgcctttgttacttcgcaacacaccacaatggccaccaatgcactcgctggcacaggtctctccatgcgatctctccttcctcaaacacaggcatttacctcaatttctggcctgagatctgtttcaatttccagctttgggagaaagaatgtttcttttagcttgtcaccactcttgattttccttaaaactacctgtgctgcttaaccagataca

SEQ ID NO: 51807 - DNA, 328 bp, Glycine max
  Clone ID: LIB3167-018-P1-K1-D12
ggggagaggtgatcactattgcatccacaaaccgaccagacattctggatccagcacttgtgaggcctggcaggtttgatcggaaaatatatatccccaagcctggccttattggccgcatagaaattctaaaggtccatgctcgtaaaaagccaatggctgaagacgtggattacatggctgttgctagtatgactgatggaatggttggtgcagagctagccaacataattgaggttgctgccattaatatgatgcgtgattcaaggactgagattactactgatgacttattgcaagctgcacaaatggaagaacgaggaatgct

SEQ ID NO: 51808 - DNA, 355 bp, Glycine max
  Clone ID: LIB3167-018-P1-K1-D2
atgagctcctgcaaccttatcctgttttgcatgaaaagcctggtgattatgttgcacatatcaaattcactgtcttgctaatgcccaatggatcagatcgtgttacgtctcactcactccaggagttgcagcccaccaaaacaatagatgatcccgaaatcaaggcgtggctagcattgggcacaaagacaaagaagaaaggcggtggaaagaagaagataggtaagaagggggcagaagctgaaccaatggatgcaacaaatgatgctacaccccaagaacaagattgagagacagaaaccctttgattttgcttttgatccccttcaattttggtacatttttcacctagttg

SEQ ID NO: 51809 - DNA, 286 bp, Glycine max
  Clone ID: LIB3167-018-P1-K1-D3
cccacgcgtccgcccacgcgtccgatataactagaaacagtgtgatgaaaatgaaggtccttgttttcttcgttgctacaattttggtagcatggcaatgccatgcgtacgatatgttccctcttcgaatgaacactggctatggtgcccgtactcctgaggtgaaatgcgcaagttggaggcttgctgcggaagcacacaacatctttggttttgagaccattcctgaatagtgcgttgaagtatcatatgaattcattctatggctatcctttgtatattcatt

SEQ ID NO: 51810 - DNA, 144 bp, Glycine max
  Clone ID: LIB3167-018-P1-K1-D4
cgggtccgacccacgctgttcgcccacgcagtccgcccacgcgtactggtgtattcaaaaagcacactgaaatcagaaggtggaaaccggtagccattaccacttgtccactttggcggagtggctgctcacactgtttttact

SEQ ID NO: 51811 - DNA, 235 bp, Glycine max
  Clone ID: LIB3167-018-P1-K1-D6
cccacgcgtccgcaaatcttgatgtttccagcaacatttcctgttactgtaaaggcagtcaaggttaggtatgggggaaaaccttatctcatcaaccttatggatgagctatcttttgaaaggtattacacaattttatgcatttttggtaaaaagacaaatagtccactagcttaatactctcttttcaaagcctgcatataatccagattatcatcttttgtaacttacctaa

SEQ ID NO: 51812 - DNA, 334 bp, Glycine max
  Clone ID: LIB3167-018-P1-K1-D7
acccactaagatggcttcctttgtatccttcctagtgctgcttcttgcagcccttatcctcatgcctcaagggcttgctacttactacaaaccaattaagaagccaccagtgtacaagcctccagtgtacaagccaccagtgtacaaaccaccggtttataagccaaaaccaccggtttacaagccgaaaccaccggtttacaagccaccatataagaagccaccatacatgaaaccaccttatggaaagtaccctccagtagaggacaacacccatgcctaaagcaagcaatgaggtctattatctacttaataaaataataggaactgcttt

SEQ ID NO: 51813 - DNA, 306 bp, Glycine max
  Clone ID: LIB3167-018-P1-K1-D8
cacgttttcaattcaacaagaaccattttgctgatttgttgatgattactgggattggagccactcttgcacaactatttttcatgcccattttagtgcctgtgataggagaggagaagctgctctccacagggctcttaattagctgcataaatgtctttgtctacagcatagcatggacagcatgggttccttatgctctagcaggttgctctgtgtttgcagtttttgtgcgcccaagtttatgcagcattgcatcaaaacaagttggacctactgaacagggaatggttcaaggatgttttt

SEQ ID NO: 51814 - DNA, 217 bp, Glycine max
  Clone ID: LIB3167-018-P1-K1-D9
ccacgcgtccgggtttttttgtgtttgagagaagcatgagcaggagttgggaattccggtgaagctgtcacgaggcttgggcacgtggtgactgtggagctcatgagcggagaactctacaaggcgagatcgagtgcgaggacaactggactgccaactcgtgagcatacctacactgcaggatggcaaaacatttaacttgagcatgtttattcag

SEQ ID NO: 51815 - DNA, 382 bp, Glycine max
  Clone ID: LIB3167-018-P1-K1-E1
ctgcaggctacgatgggtaagggatctgggagtttcggtaagagaaggaacaggacccacaccctctgtgtgaggtgtggccgccgcattttccacctccagaagagtcgttgcgccgcgtgcgctttccccgctgcgcgcaccaggaaatatatctggagcgtgaaggccattatgagaaagaccaccggaactggaaggatgaggtacttgcgttacgtgccccgtagatttaagagtgtcttcaaagacggtcccttatcttctcccttcaatagaggatttgctgccttttccttattctttgaataattataatttttgctcggctatcttaattatatatgattttttcctttctttcttttttccccactatatt

SEQ ID NO: 51816 - DNA, 242 bp, Glycine max
  Clone ID: LIB3167-018-P1-K1-E10
gcccacgcgtccggtttcgctttcattcttcgggcaatcggcttctgcttcaaggaaggagagcttgttattctctatcaacaagtaataatgtcaggtgaagagggtgtcattgcagttgagccagctgctgctttttctgtcatcccaggctagccaattgatattatgactgcctttcaacttgtgctcataatatttccggcttatggtgctttgtctcttggccttctaataatgtt

SEQ ID NO: 51817 - DNA, 319 bp, Glycine max
  Clone ID: LIB3167-018-P1-K1-E11
gttgtggtggatggaagcaccgtatacttggcattgtgggatactgctggtcaggaagattataataggcttagacccttgagctatcgaggagctgatgtttttatacttgccttttctctcataagcaaggctagctatgaaaatattgcaaagaagtggatccctgaactaaggcattatgcccctggtgttccaataattctcgttggaacaaagttagatcttcgggaagataagcaattttttatggaccaccctggtgcatttccaattactacaattcagggagaataattaataaatctgattggtgctc

SEQ ID NO: 51818 - DNA, 367 bp, Glycine max
  Clone ID: LIB3167-018-P1-K1-E12
gcgaaggactttaggttgggatttgggaattagggttattcgcgtggcgaagatgattgaggtggttttgaacgatcgattggggaagaaggtgcgcgtgaagtgcaacgacgatgataccatcggcgacctgaagaagcttgtggcggctcagactggcacaagagccgacaagatccgcatccagaagtggtacaccatctacaaggatcacatcactctcaaggattacgagatccatgacggcatgggtctcgaactctactacaactaaacacaacaaggtgtgttttatgcgtaatatactatgtgctgggaatgggataagcgctaaatgtaattctgacttgcgaaagttcccatgatt

SEQ ID NO: 51819 - DNA, 256 bp, Glycine max
  Clone ID: LIB3167-018-P1-K1-E2
cccacgcgtccgggagagtgcttatatagagagcaaaacatattattttcattttcatctttttttgagtatcaacagatggcaaccactgtgatgaccactctcccccaattcagtggtcttagaccccaattctcagctgcccctgtgaagaacttggttgctgtgcaacccatgagtcgcaaggggaagggtgcattgggagctcgatgtgactacattggttcattcactaatctgattatggtggcttcta

SEQ ID NO: 51820 - DNA, 358 bp, Glycine max
  Clone ID: LIB3167-018-P1-K1-E3
atttattctatgcctttatgcctatatactgtttacttgaagctgcatcaatcgaggagggattcttcttcatctttggattcgcttttgatgcctcggagtcagagctgggatgaaagctgaattttggggaaaatggcaactctagttgaacctcccaacagaattaagccaaagggcaagcattattatacaatatggcaaacattgcttgagattgatacgaagtatgttccaatttaacctatatgccgtggagcgtattgcttttttgcgctccttgttcttcatggacaccattttatattgccgtatttaatttcgatcggtaattttattctctagaaaatttattttt

SEQ ID NO: 51821 - DNA, 238 bp, Glycine max
  Clone ID: LIB3167-018-P1-K1-E4
gttgttgaactcgttcttcttcttttgttgttctgtgtttgtgtttgtttttggtctcacctgaaaatggctggctgcggtggtaactgtggttgcggaagctcctgcaagtgcggcaacggctgcggatgctgcaagatgttcccagacttgagctacactgagttaaccaccaccgagaccttttttatggtagtggcaccttgttaatgctcaatttgttggcgctgaaatgggt

SEQ ID NO: 51822 - DNA, 206 bp, Glycine max
  Clone ID: LIB3167-018-P1-K1-E5
cccacgcgttcgattgcccaaactctatttcatccaaaccctaacacacacccatgggagtaattttccatggctggcgtcactgttgcattttaggttgcacctgctctgcatggtgtggtcagtttacctcttatacacgcatttatcacaaacattttatttaccagctttcttttacgcatcaatcccttactttaacaaat

SEQ ID NO: 51823 - DNA, 160 bp, Glycine max
  Clone ID: LIB3167-018-P1-K1-E6
aaaaaaaacccttagccaacacaactttttatggccacctctgttattcagcaatcagcattcactggtcaaactgctctgttgcagctcaacgagttcgttcgcaagaccggtggtgcctgcaaaggttgattaacatgcgtcggaccgacaagagatg

SEQ ID NO: 51824 - DNA, 122 bp, Glycine max
  Clone ID: LIB3167-018-P1-K1-E7
catttctgtttccgcttcttcattttatttcagcacaagtaattatagaaagagactttattcctcacacagacgaaaacatatatctttcactttttctgcatccgacgctagatgaggtg

SEQ ID NO: 51825 - DNA, 267 bp, Glycine max
  Clone ID: LIB3167-018-P1-K1-E8
cggacgcgtgggttagattggtgtgtaaagcaatggcatcgtcactacaagcagcagctactttcatgcaacccagcaagtttttgcagctaaagtctactcaagccatatctaaggcttttggtttggaacctgctggagttaataaggtcacatgctcccttcaggctgatcttaaggacttggctcacaagtgtgttgattctaccaaaattgcatgctttgcccttgtcacctctgattttgttgattctggggcaagtgctg

SEQ ID NO: 51826 - DNA, 239 bp, Glycine max
  Clone ID: LIB3167-018-P1-K1-E9
cccacgcgtccgcccacgcgttctgtcgcaattacctcgctgaaggagaaaaccggttcgagccaacacgcgagtgcgaagttcatcgaggagaagcacaagcagcttccaccgaacttcaggaagcttcttctctaccatttgaagaaacttgtagccgctggaaaactcgtcaaagtcaaaggctccttcaagctcccacctacccgaccttttgcatctttcttcttctttcccgg

SEQ ID NO: 51827 - DNA, 294 bp, Glycine max
  Clone ID: LIB3167-018-P1-K1-F1
cccacgcgtccgaattaagcaacacactcttcaatttatcagcatggcctccgttcagtgccacaaaacctgcaaagtgagctgccaacaggaaaaccagcacgccttgtttgggcagaaagtttctgacttgttcaaagggcatcaacataatgaccacagctccaattatgccacccaaaccaaagtgctttcccagtcagggtcagggttaggccctcttaccaccaaaacttaaacacaatgcgggtgcccccaaacacatctcagttccactcatggctccaacacaaa

SEQ ID NO: 51828 - DNA, 366 bp, Glycine max
  Clone ID: LIB3167-018-P1-K1-F10
ctctgtcaacacctgtctgtggcgcgcgagagagaaatcggagatgtcatcaaaccctaacgatcctcgtcagcgcctcggcggcgagaccctacgtggcgccgcagatttcgccgcaggaccttccgatcgactacgccggcttcatcgccgtcatatttggcgtcgccggcgtcatgttcaggtacaaactgagctcttggctggcgctcatattctgcgcgcaatccgtcgcgaacatgcggaatgtcgagaacgatctcaaacaagttatgatggctatgatgttttctttaatgggattgataacaaactactttggacctcctagacccggcaaacaaagttgagatctcaagaatttga

SEQ ID NO: 51829 - DNA, 368 bp, Glycine max
  Clone ID: LIB3167-018-P1-K1-F11
cccacgcgtccgcgcaagcggcatagttatgctaccaaatccaaccagcaccgggttgttaagacccctggagggaagttggtgtaccagaccactaagaagagagcaagtggacctaagtgccctgtcactggcaagaggatccaagggattccacacttgagacctgctgaatacaagaggtctagattgcctcggaaccgcaggaccgtaaaccgagcctacggaggtgttttatcaggaggagctgttagagaaaggattattcgtgctttcctggttgaagagcaaaaaattgtgaaaaaggtattgaagatccagaaggcaaaagaaaagcaggcatcaaagagttaagctgttgagtgatt

SEQ ID NO: 51830 - DNA, 317 bp, Glycine max
  Clone ID: LIB3167-018-P1-K1-F12
aaaataaaaaagacatttcaataaataataatacataagattgatatgaaagaaaaacacaattttctaataagatgatattcacaatttccttaaaacatcataattcatatatgatggattgttgaagcatcttcattctcatctaattggacacacgcttggccaatctgggtgaagttctaacaccgtctcctcagcagcttcacttgtaatcttcttcgttttgcgatttgaattctctgccgcttcaaccaccgtcttcttcacagctttgacacctttaaccaatctgctactccgagttttcaaccacg

SEQ ID NO: 51831 - DNA, 283 bp, Glycine max
  Clone ID: LIB3167-018-P1-K1-F4
tagatctgtacccgcctagccattgatttggaaaagtccaacttcaaggatgagtaagcttcatagtgatgctctaagagaagctatctcaggaatcatggctgattccaaggaaaagaacaggaaatttgtggagaccattgaactccaaattgggttgaaaaattatgatccccagaaggacaagcgtttcagtggctctgttaagttgcctcatattcctcgccccaagatgaagatttcgcatgcttggtgatgcccaattcgttgaggaggctgataa

SEQ ID NO: 51832 - DNA, 291 bp, Glycine max
  Clone ID: LIB3167-018-P1-K1-F5
caaattctttagtgctcggtacattttttttgaggggccagcaatgaccacatgtggtctactcccatctcctgggggagctgctatactgagcaaagggactaatagaatttgcactcgtgctttatttcactcacttaaattccatgtgaagaagggattcagagtgagagctcttaaagaaaaatacataggaaattgacagtccttcacaatcattttcacccgaggaagttacaaaaaagtatggcctttaagctggtattattcgtgctttcctggttgaagagc

SEQ ID NO: 51833 - DNA, 352 bp, Glycine max
  Clone ID: LIB3167-018-P1-K1-F6
cccacgcgtccggaatctcagaattttctaaaagagatctttttctgctctttgaggaaagaagggtctttgcttgattttggagatgtctctgctctcagatctcatcaaccttaacctctccgataccaccgagaaggtgatcgcagagtacatatggatcggtggatcatgaatggacctgaggagcaaagcaaggactcttccaggaccagttagcgacccttcagagctttcctagtggaactatttatggttccagtacaggtcaagctcttgttgattacagtgatttgattttatacccacaatccattttcacggttccattcataagtgtttatctattttc

SEQ ID NO: 51834 - DNA, 162 bp, Glycine max
  Clone ID: LIB3167-018-P1-K1-F7
agctattcctagttctttgttttagtggaaccgaacagagacaagaacaaccttcaggaatattgcattttctttatcctcgggcttctgtccccttcttggatctcatattcattcattacacattccaccttattggccgttttgtctccaacgctgtgt

SEQ ID NO: 51835 - DNA, 340 bp, Glycine max
  Clone ID: LIB3167-018-P1-K1-F8
cccacgcgtccgattgtattcttgttaggaagatatcttgacaaaatggccgtaacagaagcaaacctaaagaaggctggcttccacacatgggagcagttaattctcaaggatccacatcttatcactccaaatgcactttcatacaaatcagcaatgagagagaatctgttgaggcagggatacagaattgttggaatcattggagaccaatggagcgatctgcttggagaccacagaggcgaaagcaggacctttaagcttcctaatcccatgtactacattgagtagtaccttcacctttctcaacaatctagctagagtttgcctcctatctatt

SEQ ID NO: 51836 - DNA, 360 bp, Glycine max
  Clone ID: LIB3167-018-P1-K1-F9
cccacgcgtccgcaatattattcaatataaaagaaagaaagatgagtccaacatgggtttttgtgttagggattgtggcagcaatgttggtggttgtgaatggacaatcatcagtgaagccattggtgaagacagtgaaggggaagaaggtgtgtgacaaatggtgggagtgcaagggttggtctgttttattgctgctatgagactatctactattactttcatacattcctatctgagaaccttttctctaaacttattttttcttctgcacattcttcccgtaatttttgtattaccccaattttttttttctttcaacaatttattttatttaacttcatttttttttttttaccc

SEQ ID NO: 51837 - DNA, 246 bp, Glycine max
  Clone ID: LIB3167-018-P1-K1-G1
gggagaaagggtgtgagaatggagagcatagaggaagatgtaagggttggagcaacgaagttctcagaaaggcaaccgattggtacagcatctcaaggtgacaaggactacaaagaaccacccccagcacctttgtttgagcctggtgagctaaagtcatggttcttctacagagctggaattgctgagtttgtggccactttcttgtttctctacattaccatattaactgtcatgggtgtcaac

SEQ ID NO: 51838 - DNA, 240 bp, Glycine max
  Clone ID: LIB3167-018-P1-K1-G10
acacttccgaaccttgcattgtatttacccacttctcaaccaacaatggcagtggcaacccaagcctgtgtgttgaccccacccctctccggtctcaaacccagcgaccgagccaccgtgccatggaaacaattcttcaccctctccttctccacctcgaagccccttaagttctcgcgatcaatcagagcagtagtcttcgaccagacctcatttggcaccggttggttttaccccacc

SEQ ID NO: 51839 - DNA, 316 bp, Glycine max
  Clone ID: LIB3167-018-P1-K1-G11
cggacgcgtgggtgcaaaaatggcatcattcaccatgacagctttcatccttggcagtccatccgtcaccggccggtcggaactatcaacgcaaaggagatcactcgtagtgaatgctgtcaaagctgttgaagcagaaaaggtcagttatgacaatgacatggatggtatcaatggaaggaggaacttgatgttcgccgcggagtgtgttgctgcttgctctgttgctgggatggcagtggcagatgagcctaaatcagtaaccccatattccaagaaaaagtatgctccgatttgagttaccatgccaactgct

SEQ ID NO: 51840 - DNA, 357 bp, Glycine max
  Clone ID: LIB3167-018-P1-K1-G12
cccacgcgtccgaaaatcacttcatcatggcttcctcgtgtgcttcctctgccattgcagctgttgccatctccacaccaagttcccagaagaatggatcactcttgggaagcacaaaagcttcttttcttagtgggaggaaactgaaggtgaacaactttacagcaccagttggagcacgatccagcactacagtttgcgcagttgctgagcctgataggcctctgtggttcccaggcagcacccctcctccatggctagatggcagtttgccaggagattttggctttgatcctctaggtcttgcatctgatcctgagagcctgagatggaatgtccaagcagagcttgtgcact

SEQ ID NO: 51841 - DNA, 369 bp, Glycine max
  Clone ID: LIB3167-018-P1-K1-G2
cccacgcgtccgcgaagaaaaacatgtagcaaattgggatcgaagaatttgaagaacaccacaagcaagatgcatggtgttgtggtgctcaacacgcaatcctactgcagaggcctagaacctccttcatcttctccttccgtcgtttccaacaagggaacaaggactttgagtttcaggaggctgctgctgcgtccttctcttgggattcatttatcgcgtagctttgctttaaagtgtgttgttactccgaacccagctgtggaattgccattaactgctgaaaatgtacaaagtgttttggatgaaaattcgaccctatctttattgcagacggtgggaatgtggctttcatcaaattgatgcaat

SEQ ID NO: 51842 - DNA, 237 bp, Glycine max
  unsure at all n locations
  Clone ID: LIB3167-018-P1-K1-G3
ggcgggcccacgcgaacgcccacgcgtccggggatactggtctgtgttcatggataaaattcatgaatttgttccgatggatcaacaacctgaaggtcttcaaaagctgtcanaatgaaacttcaccttgaggattatgtatgagcagtttcagaacttacttaaaatgggtcccatttttctggcttcttctattctaccaggatttagttctgtattaatgccatatggtcctaa

SEQ ID NO: 51843 - DNA, 307 bp, Glycine max
  Clone ID: LIB3167-018-P1-K1-G5
cccacgcgtccgcttctcttctcacacaatctctgttcaacaacgctagagaataatatctcaagtatcatgtgatgagatgaaccaagcacaacaacttcaagaagcttgaagtttgaactgtcaccttccttcggatgtgatttgggctccaacccctagaccacctttctgatcatcatcaatcaactctatttttaattcgtgcttgtgttgtgaattttgtttcgttaatctagtctgttcgagttgtaatgctgctgttagcttatttagtcctagttctaaattcaaataatactgattt

SEQ ID NO: 51844 - DNA, 139 bp, Glycine max; identical to SEQ ID NO: 18082
  Clone ID: LIB3167-018-P1-K1-G6

SEQ ID NO: 51845 - DNA, 307 bp, Glycine max
  Clone ID: LIB3167-018-P1-K1-G7
agaaacatgaagaaggtttcacccttggcattttccattctctttttggcctgcaccatataaccctttatgggcattgctgcagcagcaccagaagcagtgcttgacacctcaggccagatgctgagaacaggtgtcaagtactacattctgccagtgcttagaggcaaaggcggaggcctaacagtttcaagcagtggctacaacacatgccctctctttgtggggcaagagaagctagaagtctcaatgggcactcctattaccttcacaccttacaaagccaaaagtgttgccatactaacct

SEQ ID NO: 51846 - DNA, 120 bp, Glycine max
  unsure at all n locations
  Clone ID: LIB3167-018-P1-K1-G9
cccactcctcctttctcccatcccgtccatcctccaccaacctcaatcatttatgttctctttaaaaataattacgtcctgctaacctnanctctcataaatccttctatgataatatca

SEQ ID NO: 51847 - DNA, 245 bp, Glycine max
  Clone ID: LIB3167-018-P1-K1-H1
caaaagtggaaggatcttcaagagtctattactgcctacccgatcccatcaatccgtagaataacattctacatcggggggctagagcagaacatcaccttcatcagctacaagccctcaagcttgtaagggtgaaaaatgcacaaagcatttggagtcttcaccccacttactacataacaacttaaactacatacccatatattaatgcttattgtgaatccatcattctgtatagggaattc

SEQ ID NO: 51848 - DNA, 255 bp, Glycine max
  Clone ID: LIB3167-018-P1-K1-H10
ctcacgcgatcgtatatatgttcatttttccgtcactgactcataccatttgggtgtatagctttgctacggggatcagtctttcaacttcccaccgttctaaaaccttagacttcctcatgttccatcgaattcagaattttttggcctcaagctatctcattcttgcttttccacaaaaaccttttcttctttttcacgtcgggcgcttcattttttccaaggtgactaaaggttcaaagccacctaatatta

SEQ ID NO: 51849 - DNA, 238 bp, Glycine max
  Clone ID: LIB3167-018-P1-K1-H11
gtgatcattaacatgtaccttatttgtgtaccccaaacttctgtgtttggacaagtatgatctggtaacacgaatactctcataggagatttcttcggccttcagaaaacttcttttggcatttcaaactcttcagatagtagaggatagatcatattgtagtgtctagctagtgtttggactaaaaatttctctaaacacagtggcttgctgaattatacctatctgtctttacttt

SEQ ID NO: 51850 - DNA, 373 bp, Glycine max
  Clone ID: LIB3167-018-P1-K1-H12
cctcaagtgcatggctggcttccccaccagaaagaccaacaatgacattacctccattgctagcaacggtggaagagtgcaatgcatgcaggtgtggccaccagttggcaagaagaagtttgagactctttcctacctgccagaccttgatgatgcacaattggcaaaggaagtagaataccttcttaggaagggatggattccttgcttggaattcgagttggagcacggtttcgtgtaccgtgagcacaacaggtcaccaggatactacgatggacgctactggaccatgtggaagctgcctatgtttggttgcactgatgcttctcaagtgttgaaggagcttcaagaggctaagactgcataccccaac

SEQ ID NO: 51851 - DNA, 345 bp, Glycine max
  Clone ID: LIB3167-018-P1-K1-H3
accgggccggcccacgcgtccgagcaaacactctagagttctaagcaatttctattatctccgatttcaacgaagaggagccgaaacccgatcactcttgaccaccgcaaccccaatcctcttcttcttcgtcttcgttcagtgctacttttgaccggtcaaatcccatcgctttcctggatagagtcttcgaattcgtctccgaacagagcgactttctggcgacgcagagcgccgagaaggagatagtgtcgctggtgcacgccgccgggaagaagaagagagagcttctcaaggcggagagagaaaatgcctataagaagaagagagaggacctcaaggtca

SEQ ID NO: 51852 - DNA, 349 bp, Glycine max
  Clone ID: LIB3167-018-P1-K1-H4
atcatattttcaaaacgcataaccattattgtctttcccctttaaccactctcaccggggggaccacgacgacggggacgaaccaccccccctttacccttcttcgggttataccttcaacaacccttcaccacccttatacgggatccttcatgcataatacttactttaccttttttagcaagatccaacacttccgtttgcgcaactgctgagcctgataagactctgtggtttccaagcagcacccctcctccatggttagatggcagtttgccaggagattattgctttgatcctctaggtcttggatttgatcctgatagcctgtgatggaatgtccaatcat

SEQ ID NO: 51853 - DNA, 331 bp, Glycine max
  Clone ID: LIB3167-018-P1-K1-H6
cccacgcgtccgcccacgcgtccgaactcctttttttacctcttcacattctccatttcacagggttctgatcatgttggggaagaggccccggccaatgatcggaaagttgtcggagttgttggtctcgagaggccttacggtggcatatttggacaccaccggaagccctagaggcccattagacatgaagatgatgcattcatcaccaagaggcttaaaaaactatgatcttggtggtgttggtcttggaattgtattggctcttgataaattcaacgaggttgttgtacgtgaagttttcccaaacacaccgtttgtaccctcaatt

SEQ ID NO: 51854 - DNA, 244 bp, Glycine max
  Clone ID: LIB3167-018-P1-K1-H7
ctctattgttctctccgtctccttatccttctttttggtgctacttaccaagggacactctaccgataccgggtgtttcaccttcaacaagttcaacccagtccaaccaaacattatgctccaaaaagatgctagtatttcatcctctggggtgttacaacttaccaaagttggcagcaacggtgtgcccacctcgggatctctcggtcgtgccctttacgctgccccaattcagatttgggac

SEQ ID NO: 51855 - DNA, 237 bp, Glycine max
  Clone ID: LIB3167-018-P1-K1-H8
cttcgtcaagagctcaacgactccgtttgtgttctcttcgtcttccgcatcgcgcatctctcgtgcttcgaggggtctgtcagttgtgataagcgttgagtcgttgatgcctcttcacagtgctattgctaatgctaggctcacctccaatatcgccttcgattccacctgctggagctcgctttctcgaggacttaaaaaaacattgtgacaggcctgctggatccattcaagatg

SEQ ID NO: 51856 - DNA, 342 bp, Glycine max
  unsure at all n locations
  Clone ID: LIB3167-018-P1-K1-H9
ctcagccagccatttcagcgttccttatagatcaaggtcgtcaaccccatcggctggatggacagaaatgaggtggctagggttatctggaantcaatcaaggacaagctcattttgcccttcttggagttggacatcaagtattatgacttatgcttttcttaccgtgatgagaccgatgataaagttacaattgaaagtgcagaagcaactctcaagtacaatgtagcaatcaagtgtgcaactatcactccagatgaagctcgtgtgaaggagtttggccttaagtcaatgtggaagagtccaaatgggactattatgaacatttttaatggaactgtc

SEQ ID NO: 51857 - DNA, 150 bp, Glycine max
  Clone ID: LIB3167-019-P1-K1-A12
cccacgcgtccgctgttcctggttttatataaatgtgaaattgaaggaaccagattccttaatcagttgtgtatgcttaagtcatgtatttggagtggctgaatgtatttgtatttgtcattaataaagagagttgtgttagtataatgg

SEQ ID NO: 51858 - DNA, 410 bp, Glycine max
  Clone ID: LIB3167-019-P1-K1-A6
gaaagagagagagagagagagaaactgtgagaaattcgcaaaccctaatttcggaaagatcggcgatggctgcctccaaggatcgcgagaacttcgtctacatcgccaagctcgccgaacaggccgagcgatacgaagagatggtggaatcaatgaagaacgttgcgaatctcgacgttgaactgactgtggaggagcggaatttactttctgttgggtacaagaatgtgattggtgctcggagagcatcgtggaggatcctgtcttccattgagcaaaaggaagaaacaaaagggaacgagttgaatgcgaagcggattaaggagtacaggcagaaggttgaattggagctttcaaacatctgtaatgatgttatgacagtgattgatgagcaccttatcccttcggct

SEQ ID NO: 51859 - DNA, 408 bp, Glycine max
  Clone ID: LIB3167-019-P1-K1-B10
caaccttggatcaggtttagggaatggctgcaatcttagctcgaaaatcactccttgctcttcgtgcgcgccaattggctgtaagcggtcaagggctgcacagctcccaatactatggccttcggttaagtgcacactccttctctaccaaaagagaggatgaggaaagggagcaactcgcaaaggacatttcaaaggattggagttctgtctttgaacgtagcattaacactctctttctcactgaaatggttcgaggactaatgctgactctgaaatacttctttgaaacaaaagttacaatcaattatccatttgagaaaggccctttgagccctcgtttccgtggtgaacatgcactccggcgatatccaacaggggaggaacgttgtattgcttgcaaacttt

SEQ ID NO: 51860 - DNA, 407 bp, Glycine max
  Clone ID: LIB3167-019-P1-K1-B11
cccacgcgtccggagaagcattatcaattgcaagaagaactagtctaagcagaaatggcctcttcagtgatggcatctgtggccctcaaacctgcccctttcactgttgagaagtcctcagttagaggccttccctccctctcaaggaactcctcttcattcagagttgtggccagtggtggcaagaagatcaagactgacaagccttatggaattaatggtggcatggctttgagggaaggagttgatgcatctggcacgaaaggaaagggaaagggcgtttaccagtttgtagacaaatacggtgctaatgtcgatggttacagtcctatctacgacaccaaggactggtctccaaccggtgatgtctacgctggcggtacgactggcttggctatctgggctgt

SEQ ID NO: 51861 - DNA, 202 bp, Glycine max
  Clone ID: LIB3167-019-P1-K1-B4
cacgcgtcaggatagtacctacattttactaatggtataagttgccaaggcaatggaaaaaggaaatggttcctttcggaggtggttatcgcatgggttaattaaaagttgagtatttgcttgtgcagtaattgtagcgatgataattctctattacatgaaaaacggctgcttttttaaaaaaaaaaggcggcgttgagtc

SEQ ID NO: 51862 - DNA, 409 bp, Glycine max
  Clone ID: LIB3167-019-P1-K1-B5
gatcatcaaacacatacacagagcctgccatggtttccgcttgtgcttcctctgccattgcagctattgccatctctacgccgagaagaatggatgaggcttgggaagagcaaaaggttgttttgttagtgggaggaagagagcagttggaggacgatggatgggcactagagtgtgtgcagttgctgagcctgacaggcctctctggtcctccatggctggagagctggaatacttcacagacaccactagcctctttttcataggctttcacccctaagtgaaattaaaggcttagatcgatccacaactaatggatatgagattgccagctgtttgacccaatttatagagcgaaatcgtcttaggagatgagtgtttatgtctgtaatatgatctatatggtaat

SEQ ID NO: 51863 - DNA, 408 bp, Glycine max
  Clone ID: LIB3167-019-P1-K1-B6
gcgaatccctctctctatctctcacacacactttctctctctctctctctcacccagatcttgtagcaatggcgagcgctcccactccacgcgaagagttcgtgtacatggcgaagctggcggagcacgccgagcgctacgaggagatggtggatttcatggagaagggctccgcctccgccgagagcgaggagctgaccgtggaggagcgtaacctcctcttcgtcgcctacaagaacgtgatcggcgctcgccgcgccttctggcgcataatcttctcaatcgagcagaaggaggagagccgcggcaacgaggaccacgtcgccgtcattcgcgactaccgctccaagatcgaggccgagctcttcaacatctgcgacggaattctcaaactcctcgacacgcgcc

SEQ ID NO: 51864 - DNA, 400 bp, Glycine max
  Clone ID: LIB3167-019-P1-K1-C10
ctcactcgtacggtgattgaccttctataactagagggtatggttagtgaaataagcggaggatcaggagggtaggttgttactgtcaaatgaggagctgtacaaaaaaaggagggtgagtggattgctgcatcttggagaccaaaattgtcattgcgatgtgggggaagacagaatctacagtggatcttctcactattctcggggtgggaccacattgacgctagatcaggatatagaagccttcattaaaaatacaggttcttcactcattctaagacataaataccaatgaccaactttactaggctgtgatgataaatcaagggctatatatactaattgcacatgtgctcattggagagatagacgcttgtgccgttggaatcatatacagaga

SEQ ID NO: 51865 - DNA, 403 bp, Glycine max
  Clone ID: LIB3167-019-P1-K1-C11
ggcgtaggaaaacccaacattaaggaatccctggcatattcaacagcgtcctgaagaatgatgttgtcttgccaatacaacagcttccatgaaacctcccaaattcactccctctcttatctcaaatgcggaacttcaacacatcttcccctccatacccttcgctgtggacaacgcaccggagccaccgctcctgcacacggcggcgactttgttccggcgcgcgagcgggtgacgaatgatgttgtgcgtgtggatccgaggacctcgacccaattggcgaagccggcctaggtgtcggctatgcacccgtcgaggacgtagatcttaccagcggggaaggacgccaacaatggcgaactcgcgggcgacgcgcatggggtcaggagccagctgtagaagc

SEQ ID NO: 51866 - DNA, 158 bp, Glycine max
  Clone ID: LIB3167-019-P1-K1-C12
gtaaatatttgtgttttaatttttaatttataaatatatatattaattctattttataaaataatatttattttagattctcttaagattttattttaatgagtcaaactagtttgttatatttgttgtgacaactgtatgttagttttccaacggtc

SEQ ID NO: 51867 - DNA, 429 bp, Glycine max
  Clone ID: LIB3167-019-P1-K1-C4
gtcgaccacgcgtccgaaaagtggcagtattaggtggcatcaccgaagtgcagggagctgccaacagcgtcgagatcaacaatctcgctcgctttgctgtagaggaacaaaacaaaagagagaattcagttctggagtttgtgagggtgattagtgcacagcagcaagtggtttctggagtgaattactacataacattggaagcaaaagatggtgagattaaaaatgagtataaagcgaaggtttgggagagggaatcccaagagttgctagaattcatgccaacattaggtgcaggaggcgagatcgaccatctcgctcgctttgctgtagaggaacaaaacaaaagagagaatgcaaatctggagtttgtgggggtgattagggcaaagcagcaggtggtggaagggttcatatactacatcactt

SEQ ID NO: 51868 - DNA, 409 bp, Glycine max
  unsure at all n locations
  Clone ID: LIB3167-019-P1-K1-C6
cccacgcgtncgntctttttgttctcctctttccttttttggttcacgattccttccctcctcatggagtctctggaacttgttcctcttcttcttcttcatccacgcgcatcaccaccactacaatcaataaggcaacctcgtttcccttctcttctcaatagaaaaactagaaatgccaacttgcgatcattttccgctaaccttcaaggcggcggtggcggcgctacttcacaaggcggtcccttctctttcgaagaccaaacctctcaccacaaagacgatagagctctcctcattgccagagaaaccgacgattttggctatctcgttggctttcgcttgcttcctgactctggtctcgaagagttgatgagtgtgtcacacacaataactgaggaagattcta

SEQ ID NO: 51869 - DNA, 405 bp, Glycine max
  Clone ID: LIB3167-019-P1-K1-D10
cccacgcgtccggtttgttgttgtaactcgttcttcttcttttgttgttctgtgtttgtgtttgttttttctctcacctgaaaatgtcttgctgcggtggtaactgtggttgcggaagctcctgcaagtgcggcaacggctgcggaggctgcaagatgtacccagacttgagctacactgagtcaaccaccaccgagaccttggtcatgggagtggcacctgttaaggctcaatttgagggtgctgaaatgggtgtgcccgctgagaacgatggctgcaaatgtggaccaaactgctcctgcaacccctgcacttgcaagtgaggtgttgggagagcaagcttcaagcagagatagcccttaattaggaataatgataaactattaatgtgtagctaaaaactta

SEQ ID NO: 51870 - DNA, 405 bp, Glycine max
  Clone ID: LIB3167-019-P1-K1-D11
cccacgcgtccggccccgccggataaggagaaggagaaggaggatctgcgtcgcaggcactgttcatcgccatgtctcgggtttgataacagaaattcctcagccaccaagcgtgctaggactgatggtagtcgtagggaagatgattggacatgccccagctgtggcaatgtcaatttctctttcaggacaacttgtaacatgcgtaattgcactcaaccaaggccggctgatcataattcgaaatctgctgccaagcctctacaagctccgcagggttattcatcctcagctccttatttaggttctaataccccctcttcaatatatcttggtgttccaccatatggatcttctctgttcaatggatcatctgttcctccctatgatgttccattttctgga

SEQ ID NO: 51871 - DNA, 294 bp, Glycine max
  Clone ID: LIB3167-019-P1-K1-D12
atcacgcgtcctgctcacatgataggtcactatcctaagacctggaatgaggttgggacaaccacctaacatgtaaaccccgttgccaccaacagaaatctacgacaaaactgatcatattcaagagcaccaagcttgagggtaaactgacatctatggatcagtacatctctacaacgaaaactggtcggaaagctctctcttccacaactgcaaccacctgtgctcaaccctgaaagcgttcttcgcctgaccggctctagaagaaatacttctatgctaccctcttcacgg

SEQ ID NO: 51872 - DNA, 411 bp, Glycine max
  Clone ID: LIB3167-019-P1-K1-D4
gaggccatgccttatgaaggaaggccgttagatcgaaccaaaggagacggtaaacagcgtgtcactgaagaaggctcctcctcacaatctgaagatgtgaaagcaataagcacaaaccttagggccaaagatgcatctgataaatcaacaggagaaggtgcaatcattgatttttcaaatattaagccaggtcttgctgcagatgtgaaatttggtggatgtggttcttatcctaatctgccttgggtatccacctcaggttccggtccaaatggaaggacaatttctggtgttacttataaatacggcactaaccaagtcagaattgtatgtgcatgccatggttctcacatgacccctgaggagtttgttcgccattcaaatgaagaccaggcagctgcagaggggaat

SEQ ID NO: 51873 - DNA, 411 bp, Glycine max
  Clone ID: LIB3167-019-P1-K1-D5
acaaatcaaagccatggccacctccaacttctctattgttctctccgtctccctagccttctttttggtgctacttaccaaggcacactcgaccgataccgtttctttcaccttcaacaagttcaacccagtccaaccaaacattatgctccaaaaagatgctagtatttcatcctctggggtgttacaactcaccaaagttggcagcaacggcgtgcccacctcgggatctctcggtcgtgccctttacgctgccccaatccagatttgggacagcgaaaccggcaaggtagccagctgggctacatcctttaaattcaacattttcgcacccaacaaatcaaactcagctgacgggcttgccttcttcttggcacccgtcgggtctcagccccaatccgacgatggatt

SEQ ID NO: 51874 - DNA, 410 bp, Glycine max
  Clone ID: LIB3167-019-P1-K1-D6
aaagaaaagccttcaatcatatagcattctaagaaatgaagagccctaccattttcattctgtgtctactttctgccttctacacctcactcctaccttcagccaccgctcaagtcgtggttgacatggaaggtaatgatcttcaaaatggtgggaaatattatgtgttgccagtaatagagtcatcatatggtggaataagagtagccgcaactggaaaagaaagatgccctctcactgttgtacaatctgccgatccgtatgataaggggattgcaacaattatttcaaccccatatcgagttccttatccgcgaaggctttcctttgaacattacgttcggtaattttgcagttatactgccttgtgtcccccttcgttctgagtggaccgtcgttaatggccaacc

SEQ ID NO: 51875 - DNA, 404 bp, Glycine max
  Clone ID: LIB3167-019-P1-K1-E10
caaaccaatttaggttctcttaaaacatttgcccctcaaaccactttccccacactcttttagtgtgtcgtattttttcctctctttctccacaattaggtcttggaccgacccttttgtgtaagtgcaatggccatggctaagcttgtatgtgttctgcttctggcattccttggcatttccatgatcacaactcaagttatggcaacagattctgcctatcacttggatggaaggagttatggacctgggagtctaaagacctcacagtgcccttctgaatgcacaagaagatgtagccagacacagtaccacaagccgtgcatgtttttctgccaaaaatgctgcaaagcgtgcctttgtgttcctcctggctactatggcaacaagtctgtgtgcccctg

SEQ ID NO: 51876 - DNA, 400 bp, Glycine max
  Clone ID: LIB3167-019-P1-K1-E11
caaaaaacctagcatctgtgacccaagtaagtttaacattgctaaagctggcgcgacatcatgaacagaaccacatccccacaagcatgaatgactcagtagacaaactggtaatcttcctagcaaagagagatggcatagacaagctggtgaagacgttccagtacgtgtcaaagctcgtaaactggcacgtggaagccacgcaccccgacacatccaagaggttcaagcaatgggaagtggcctccggcctcagcagaaaagccttcagaaccggaaggttcctcaccggcttcaacgttcttcgcagaaacccaggctccaccctttctctgaggctactagcagtgctctctaatgctggcgagatggtgtatttcttcttcgaccactttctttg

SEQ ID NO: 51877 - DNA, 403 bp, Glycine max
  Clone ID: LIB3167-019-P1-K1-E12
acaccacaagctccttatcgtgtttgctttgcagagagagagagaatggcgaccacacccggtttgtgtggcagtgtgttgttgagcacctcgttcctgaggaagcaggcaatggcatcagtgaacatgagaatgctgaaggctaatgctggtgtttttggcttaaagggagggcgtggagggcgtgtgagtgcgatggcaagttacaatgtgaagctgataaccccagaaggagaacaagaatttgaatgcccagatgatgttttcattcttgaaaaggctgaggaatttggcattgaccttccctactcatgcaaggctggtgcttgctcttcctgtgccggcaaagttgtttctggcaaagtcgaccaatctgatggtagttaccttgatgatacccaaa

SEQ ID NO: 51878 - DNA, 407 bp, Glycine max
  Clone ID: LIB3167-019-P1-K1-E5
atcatttggagcttaatgaggataaccttgatccacgtgcttacttgacctatctcaataccaggccaccttcatgggaggaggcagccattaaacaacttgtaagtgttacgaaggacacaagaaaaggtggccctttagaaggagcacatgttcacatcgtccacttgtctgattcaagtgcttccttagatctgattaaggaagcaaaaagtcatggtgacagcataagtgttgagacttgtcctcattacttagctttcacgtctgaagagataccaaatggggatactcgttttaagtgttccccacccattcgtgatgcatacaacaaagacaaattatgggaggctgtattagagggacacattgacctattaagtactgatcattcaccaactgtgcct

SEQ ID NO: 51879 - DNA, 407 bp, Glycine max
  Clone ID: LIB3167-019-P1-K1-E6
cccacgcgttcggataactagaaacagtgtgatgaaaatgaaggtccttgttttcttggttgctacaattttggtagcatggcaatgccatgcgtacgatatgttccctctccgaatgaacactggctatggtgcccgtactccggaggtgaaatgcgcaagttggaggcttgctgtggaagcacacaacatctttggctttgagaccattcctgaagagtgcgttgaagcaacaaaggaatacatccatggcgaacaatatagatcagactccaaaacagttaaccaacaagcttacttttatgccagagacctcgaagtccatcccaaggacacatttgtgttcagtatagatggcaccgtactctctaatattccatactacaaaaaacatggatatggggtgg

SEQ ID NO: 51880 - DNA, 405 bp, Glycine max
  Clone ID: LIB3167-019-P1-K1-F10
atttccctctttcttttgtgtgtaatgtgtaaaaccacgtcgttttgcaaaaacaaattttgaaacctcatatatgcgttagcgttaccctctgaagtctgaactgaacacgatccagagagaacccctgctccttaacgacgccgtttcgcaagcatcaatggagaagggaaagggagtgatgggatcgggaggaagaagatggggcgttgacttctccgacaattccacttctcgcgacattcccgatcctcccggtttctctcgcgcttctctcgatcaggacgattcaacgctaagtcgccagaagaaggacgctgaatccaactggaaagcccagaaagcttgggaggtagcacaagcacctatgaagaatttgctgatgatggggttcatgatgtggat

SEQ ID NO: 51881 - DNA, 403 bp, Glycine max
  Clone ID: LIB3167-019-P1-K1-F11
aatttctccaacgctatcgagccaaactcaaacgttaactcagaagaagaccagcagaagaagaagaagaagaaacaaaaccgaaccactttcaactctccaacgtcgccacacgattcgtaattcgaattccatcatcttagatctccgttttttttgctgcttctgcgttttctcgctttctccgcaatcgcaattaccatctttcatcgtttctattattactttcaactctctgaattccttcgaatcatttatgttccgtgtcgacgcgtgcgttttgttcgtcgcagatcgcgtttcgcaggctgcaatggcgacgttcgaactgtaccgcaggtcgacgatcggaatgtgcctgacggagacgctggacgagatggttcagaacggcactctcagc

SEQ ID NO: 51882 - DNA, 404 bp, Glycine max
  Clone ID: LIB3167-019-P1-K1-F12
caacagaagctgataagaaggtggaagtacttgagaaggaaattatggagtccagagagaaaatagaattttaccgtgcaaaaatgcaggaacttgttctgtacaaaagcagatgtgacaatcgtcttaatgaggtcatagaaaggatagctgctgataaacatgaggttgagattttagcaaagaaatatgaagataaatataagcaagtaggagatttatcatccaagttaactactgaggaagccacatttcgtgacatacaggagaaaaaaattgaattgtaccaagcaattgtcaagatggaacaggatggaaaaggtgatgcaactctgcaggctcatgttgatcgtattcaaacagatcttgatgagctggtgacatctctgaacgagcggtgcaag

SEQ ID NO: 51883 - DNA, 409 bp, Glycine max
  Clone ID: LIB3167-019-P1-K1-F4
cccacgcgtccgaagggaggcagcttttgaatttcaggatttgatgaaattggagaaccgagtctccactttcgttgatgatcccaatctcccatgtgaagctgcactgaagaaaatgtattcattgcttgaaaaagtggagcaaagcgtatatgctctcctgcggacaagagatatggccatttcacggtacaaggaatttggaatcccagtgaactggctaatggattcaggggttgtaggcaagatcaagctttcttctgtacaactggcaaagaagtatatgaaacgtgttgcatctgaacttgatgaactatctggtcctgataaagaaccagctagagagtttttggttctgcaaggtgtgcgtttcgctttccgtgtccatcagtttgcaggaggctttgat

SEQ ID NO: 51884 - DNA, 410 bp, Glycine max
  Clone ID: LIB3167-019-P1-K1-F5
gcaaccatggcaatggcaacccaagcctctcttttaaccccacccctctccggtctcaaaggcagcgaccgcgcctccgtgccatggaagcaaaactccagcctctccttctccagcccgaagcccctcaagttctccagaacaatcagagcagcagccgccgacgagaccacagaggcaccagcaaaagtagaggctgcaccggtcgggttcaccccaccagaacttgacccaaacaccccttccccgatcttcgggggcagcaccggcgggctcctgcgcaaggcacaggtggaggagttttatgtcattacgtgggactcacccaaagaacagatctttgaaatgcccactggcggcgccgctatcatgagggagggtcctaaccttctcaagttggccaggaagga

SEQ ID NO: 51885 - DNA, 408 bp, Glycine max
  Clone ID: LIB3167-019-P1-K1-F6
cagagaagcactcatcattcttcgtttgtctattatccgccttctctgaattgtaaaaatgtcgctcggagaaactgcttgttcatacgcagctctcatccttcatgaagatggaatcagtgtaactgccgacaagatcagcaccttgttggaaactgcaaaggttcaagtagatacctattggccaaccttatttgctaaacttgctgagaagaaaaatcttggcgatttgatagccaatgcagcaggcggtggtgcaccagttgctgttgcagctgcccctgttgctgcctcaggtggtggtggtgctgctgctgccgccccagctgctgaggagaaaaagaaggaggaacctgaagaagagagtgatgatgatatgggatttggcttgttcgattagggacattc

SEQ ID NO: 51886 - DNA, 404 bp, Glycine max
  Clone ID: LIB3167-019-P1-K1-G10
ctctgtttgcttcttgttgttgtaacttaggaacaagagattgcttcttcttcccttttgttttcaaatttcaatttttcatcgggttctctgaaatggagagagatttcatgggtctcaactcaaaagaacctcttgctgtggtgaaggaggagatgcacgtttatggcttcgaagactctggcttcacaaagggtcggattgcacagtggccattctcgaacaaagtatctgcccttccacatttgatgtctttcaaggcttctcaagatgataagactaagaagatagtgtctgatcccttaacatctgcagggtttatgtctatcttaagtcaagaagcatttgactctagtcagaaacgctgtgctggtgaaccccagaagtctttcaatcacgatggg

SEQ ID NO: 51887 - DNA, 397 bp, Glycine max
  Clone ID: LIB3167-019-P1-K1-G11
ccaggtcttagatctttgtctctgtctctgtttctactttgaggcctccgttggtggtgggtgggtctttcttctctcaaaatggccaccgtagtgaacagaaaaatttctgatgcatcatctcgggcccacaccataatggcaatgaaaaccaattccctttccctcccatcgggaattcttggaacagcactagcagtgttgtttattgggtttttagcatgggcttatcatgttattcaacctcccgctcccaagatatgtggcacttctgatggaccgcctataacagcaccaagaatcaaattaagagacggatggcatttgtcatacaaagagcatggcgttccaaatgatgcatccaagtataaaatcatctctgtccatgcttttgatt

SEQ ID NO: 51888 - DNA, 372 bp, Glycine max
  Clone ID: LIB3167-019-P1-K1-G12
gcttaaacgtctctctctcttcgtcccttgctctgtagcttggaatctgcaggtgtagatcggagactgggcaagaaggtcgcattagcttcttcatcgcgcaatggcccatccctttgctgtcgtctccgtcagaaggccaatcacccacgtcgtttttgacatggaccgtctcttgctcgacactgagaggttctatactcaagtccaggaaatcatactcgctaggtacaacaaaacctttgattggtccctaaaggcaaagatgatgggaaaaaaagcaatagaatctgctaggatctttgttgaagagactggaattagtgattctcttagtgccgagcaattcctggtagaaagagaggatatgct

SEQ ID NO: 51889 - DNA, 150 bp, Glycine max
  unsure at all n locations
  Clone ID: LIB3167-019-P1-K1-G2
tcgtccacgcgtctcgtccacgcgtnccgaaatatcttttctatgatacctacattgaaaagactgatggtaactgtaaaaacatacttaagtaataaaaaaactcaaataaaaaatataaaaaaaaatcggggcggcccttttaaagat

SEQ ID NO: 51890 - DNA, 409 bp, Glycine max
  Clone ID: LIB3167-019-P1-K1-G4
cccacgcgtccgcccaagtctcaactcatccattcatgccaacaacaacaccacacttcttgcgcgttagttagttagtttcatccgtttacaatttaacattaacatcacctaaacgccaaaccccccatgcccttttgatcccatccaacaattcaatgcctcacctcaacctcccagcctccaagcgcgttcggcagtggcgcgtgctggacctcatctcggcggcgttcttcggcctggtgttcctcttcttcatgctcgtcttcactcccgccggggactccctcgccgtctccggccgccagacgctccttctctccgcctccgcggatccaagacagcgcctccacgtggcggcggccatagaggccggtcagcagtcgcgcgtgatcgatgcctgccccgc

SEQ ID NO: 51891 - DNA, 409 bp, Glycine max
  Clone ID: LIB3167-019-P1-K1-G5
ctagactcttccttttctcttctctgtttaagtgttgtgccctgagatcacattgaacggtggtgaaggctgtggccgttcttggcagcagtgagggtgtcactggaactattcacttcgttcaggagggaagtggtccaaccaccgtaactggatctcttgctggtcttaagcctggtctccatggtttccatgtccatgccttgggggacactaccaatggttgcctctcaactggatcacatttcaatcctaataacaaggagcatggtgcccctgaggatgagaatcgtcatgctggtgatcttgggaatgttaatgtcggtgatgatggtactgtcagcttcactattactgacagccagattcctctcactggaccaaacaacatcataggaagggcggttgt

SEQ ID NO: 51892 - DNA, 289 bp, Glycine max
  Clone ID: LIB3167-019-P1-K1-G6
tcggagtcaacgaaatcgcgaacagaacagttacgtttacaatgggttcttgctacgagggggaactgaagctcttatcggcacgcgctctcaagaacgtgaactggcgccatggcccgaaccgcccatacgtcgtcgtttgggtcgacccaagcaacaagctctcgacgcgcgtggacgaaagcggcgacactgacgcgaattgggaccaaacgctcacaatttcgttgccaccaaagcctctcgaggatcaaacgttgtacatcgacgtggtccacgccggctcgga

SEQ ID NO: 51893 - DNA, 404 bp, Glycine max
  Clone ID: LIB3167-019-P1-K1-H10
cattagcaaaagcaagaagaactagtcttagcagaaatggcctcttcagtgatggcatctgtggccctcaaacctgcccctttcactgttgagaagtcctcagttagaggccttccctccctctcaaggaactcctcttcattcagagttgtggccagtggtggcaagaagatcaagactgacaagccttatggaattaatggtggcatggctttgagggaaggagttgatgcatctggcaggaaaggaaagggaaagggcgtttaccagtttgtagacaaatacggtgctaatgtcgatggttacagtcctatctacgacaccaaggactggtctccaaccggtgatgtctacgctggcggtacgactggcttggctatctgggctgtgactctacttggtct

SEQ ID NO: 51894 - DNA, 400 bp, Glycine max
  Clone ID: LIB3167-019-P1-K1-H11
gagaagagagagggtgtgtttcttggttttggaaatttcagccaatatcgaagaacaggaagccccatcaataataatcatcgaaggaatttgaaaggtcgaaacttgagcatctgggatcgcgaaattggggtttttggttaaaagggtattatcttcggaactgattgatggcaaacctgtacgtgaaggcggtgccaccggcggatctgaacaggaacacggagtggttcacgtaccctggcgtttggaccacatacatcctcatccttttcttttcttggatcctcggactctccgtcttcggttgttcccctggcatcgcttgtaccatcgttaatctcgcacactttgctgtaacatatcacttttttcactggaagaaaggaactccatttgc

SEQ ID NO: 51895 - DNA, 356 bp, Glycine max
  Clone ID: LIB3167-019-P1-K1-H12
atcaggcttccaatgcaatatcattgattacactgactgatgcaggctgcagaggcgggttgatggcagaaggattctcactgcctaatgcaacgctcgatgaaggcattcattcaaaagggtcaacctataattgcttattggcaggcatgtgcagatatcacaatgtgagagctgcaaagaagcttctcaatgaaaaggataactatcaatagtatgccgcaggtgttacatactaacatgtcaataggtgcgaggtgcaaagatcgtgaaccgagcttggcataggaattacttggtgaattgctcaactttgatgggctacctcattatgtcacatataatacatcgatgga

SEQ ID NO: 51896 - DNA, 395 bp, Glycine max
  Clone ID: LIB3167-019-P1-K1-H4
gcgggatcacggtgttcgctccggcggacgacatggtgatgaaccgcatcggcgatttcggcgagtatccttcgttctttcgccgccacgtcgtgccgtgcaggctcctgtggaacgatctggtggatttcggcgacggatcggagctgcctacgttcttggagggattcgcaatcaacatcaccagatctgacggcgttttgattctcaacggagttcgggttttcttccccgacgtgttcttcaacgacagggtggttgttcacggcgttagtgatgttctggctgcacaggacaacgcgcttcgcattgatgttgatgatgaagaaatcctgtttgacccttctgaattttgaggctatgtaaatttttagttcttgtagattcggatttcg

SEQ ID NO: 51897 - DNA, 411 bp, Glycine max
  Clone ID: LIB3167-019-P1-K1-H6
cccacgcgtccggaaaaacaagtagttgtgaactaagaagaaggaaatggcttcctcaatgatctcctccccagctgttaccaccgtcaaccgtgccggtgccggcatggttgctccattcaccggcctcaaatccatggctggcttccccacgaggaagaccaacaatgacattacctccattgctagcaacggtggaagagtacaatgcatgcaggtgtggccaccaattggcaagaagaagttcgagactctttcctacttgccagacctcgatgatgcccaattggcaaaggaagtcgaataccttctaaggaaaggatggattccttgcttggaattcgagttggagcacggtttcgtgtaccgtgagcacaacaggtcacctggatactatgatggacgctactg

SEQ ID NO: 51898 - DNA, 375 bp, Glycine max
  Clone ID: LIB3167-020-P1-K1-A1
cccacgcgtccgttctaaatcaattatttcctttatcttgtttatgtactctgactctgtgagagagtgtttgtactttgtagtagcaagcgagcatggctccgaagaaggttcttctcctttgcggggacttcatggaagactatgaagccatggttccatttcaggcattgcaagccttcggtctcgccgtcgacgccgtctgtcccggaaagaaatccggcgatgtctgccgcaccgctgtccatgtacttgccggcgcccagacttatagtgagacggttggtcacaatttttcactcaatgcaacgtttgatgaagttgatgctgcaagctatgatgggttgtgggtgccaggtgggagggctccagagt

SEQ ID NO: 51899 - DNA, 375 bp, Glycine max
  Clone ID: LIB3167-020-P1-K1-A10
gtttgttccttcttcaacttctttcattttccgaccaacgttgattcgctgcgccagcgccaatgagcggcaggcgctgtttagccgcattgctcctgtctatgataacctgaatgatttgctgagccttgggcaacaccggatttggaagagaatggcagtgtcctggactggagcgaaaatgggagactgtgtgttggatgtttgctgtggaagtggggacttatcctttctcttgtccgacaaagatggctctcatggcaaggtgattggtcttgatttctcgaaggatcagctattctttgccttatctcggcagcaatcactttcaaagaattgcttcatgaatatcgagtgggttgaaggtgatgctct

SEQ ID NO: 51900 - DNA, 381 bp, Glycine max
  Clone ID: LIB3167-020-P1-K1-A11
aaaacatctcaatgggttcttcttctattacaacatcgcccgcaaccatgaccatggctgcgatcgtgctcctgttcacggtctttgccgtttcctccgccctagacatgtcgataatctcgtacgacagcgcccacgcggacaaggccgccacgttgcgcaccgaggaggagctgatgtccatgtacgagcagtggctcgtgaagcacgggaaggtgtacaacgcgctcggcgagaaggagaagcgcttccagatcttcaaggacaacctgcgattcatcgacgaccacaactccgcggaggaccgaacctacaagctcggactgaaccggttcgctgatctcaccaacgaggaatacagggccaagtacttgggaacca

SEQ ID NO: 51901 - DNA, 300 bp, Glycine max
  Clone ID: LIB3167-020-P1-K1-A12
gtcctttaaagaaatctgttaagcattccccgaaggagcacaagaggtacaacttagagaagctgacatatgacgagaggaaggctaagctgatttcacgtgtggcagctctcaactctgctgctgataatgatgaagatgatgagtgaaagttcattgcagatgccttctcatggctacactagtagaaactatcttatttggtatctacagaatcattttcttgaaaatttatttgcctgcctgtttatttctaggcccaaaatttggatactctttttggagttgagtaagccttaa

SEQ ID NO: 51902 - DNA, 295 bp, Glycine max
  Clone ID: LIB3167-020-P1-K1-A2
cccacgcgtccgcttaggaagaaaactgtcgtgaggacaaaagaagaagtatcactcatataatactctgtatcatttcatttcgataatcatccatagctactgaagaaaatggcaaccatctctgctgctatcacaaccccatcgatctcccgcgcaactcttgtgcaaaagcgggtctcatctcccgttcttggtttgccagcaatgggtaaggtgggaagagtgagttgctccatggaggaaaaaccttattctgtgaaggaaagcagctctagcatgttggggatggggg

SEQ ID NO: 51903 - DNA, 348 bp, Glycine max
  unsure at all n locations
  Clone ID: LIB3167-020-P1-K1-A3
acgcgtacgtgaaacgcgaagacacactcatccacacccaaatccactgcgtcccccaccacgcgccgaggaagccgcacctccgcttccccaaatccactgcgacttctcctccacgcgcccccacgtccccgccaagaaccgcgccctgcgcgttcagtccacgcgcctctgggccgccaaggtcctctccttctccctcctcttgcgcgaccacctgctnctccgcgccgncgncttcaaccactcctgcgtcctctgcgtctccgctggcgccggccaggaggtcgccgcgctccgcctnctcggcatcgacgacgtcaccggcgtcgagatcctcgagtcccc

SEQ ID NO: 51904 - DNA, 388 bp, Glycine max
  Clone ID: LIB3167-020-P1-K1-A4
gtccgggatactatgactttgttaagggatcttttgtgctctggggccttcagtttggccttgcatcctctttctccgtatgaacatcaaccattatcaatgacctcatcttggttccctaagttaaagatgtggccaccattctgcattggaagctataggggccatgcttagaggtcgtgtgtatctgcaatgaaaaggcctaacccaccttcatcaccatatgatatttataaaaatatatatatatgaaactatgaactgcgtttatgcatgtcggaaaatcttcttttgataagagtttggaaatcctcttgtaacaaaattttcattattcaaccttgatctttatatagcccgcaacaccgagagagatgacaaattaatc

SEQ ID NO: 51905 - DNA, 320 bp, Glycine max
  Clone ID: LIB3167-020-P1-K1-A5
ccacgtgtgcgcccacgtgtgggtttcacaaaactttttcactggcgcaattctgtgtttgatgagacctgaggttcatccgcattgccactttaaggagaaaacctttttccttggccgagcctcctgaggatttgaagccagatgagcctgtttaccaaattcgatttacaaaagaaatctttcaagattatcatgattatttgaagcgattgaatctataccgccagagggtttggatgtgtaaagtcactggaaaaactggcttgacatatgaagaggctttggtgtctgaacaacttgctaccgagaaagttcaa

SEQ ID NO: 51906 - DNA, 385 bp, Glycine max
  Clone ID: LIB3167-020-P1-K1-A6
cccacgcgtccgcccacgcgtccgcaaccccttgaactttgcacctactttggaggccaaggagaaggaacttgccaatgggagattggctatgttggcattcttgggattcatagttcaacacaacgtgacaggcaaaggaccatttgagaacctcttgcagcacctctctgacccgtggcacaacaccatcatcaatacaattcgtggctactaagtttgtatccaatgacatggataagcctgtgtccttctcgtgtaatcctgaatggatgaattttgagagtgatttgggcgtgattgttgtgatccatctattttcatgtacagaggaactacgatggttttatattgttatttagactgtccatcaatcagtaatcaa

SEQ ID NO: 51907 - DNA, 309 bp, Glycine max
  unsure at all n locations
  Clone ID: LIB3167-020-P1-K1-A7
acccacgcgtncgcccacgcgtccgttctaaatcaattattttctttatcttgtttatgtactctgactgtgtgagagagtgtttgtactttgtagtagcaagcgagcatggctccgaagaagggtcttctactttgcggcgacttcatggaagactatgaagccatgggtccatttcaggcattgcaagccttcggtctcgcacgagacgccgtatgtcccggaaagaaatccagcgatgtctgccgcaccgctgaccatgtacttgcctgcgcccagacttatagatagacggatggtcacagtttt

SEQ ID NO: 51908 - DNA, 414 bp, Glycine max
  unsure at all n locations
  Clone ID: LIB3167-020-P1-K1-A8
ccggatncgcaagtccggcctacgacccacgcgtacggtaacttgatatgcaaagactcattgatatatgtattgagagcgtgggagaactgattcagtcaaattttggcaaagaggtcttatatgaggttgcaacagggggttctgagggcataatgcacccagctttaggtgataagataaattccctccacaatgcagtagcttctcttgcagcaatgcctaaatcagaagattcacaagaggagcatgtccttgaaaatttccattcaagtcgcaccattagaaaactgattttggattgccccaactttgcttccaccttatgggaaaaagctttaaaagggaaaagtgagttatgggtgcatggccacagctgtaaggttatttctgcatttttggaatcaccagacc

SEQ ID NO: 51909 - DNA, 344 bp, Glycine max
  Clone ID: LIB3167-020-P1-K1-A9
gaaatacaacttgacggtgaacgatttggttaagaccttaaagcagatcttttgaagttgtaatataatgtatgagatgtaacttcatgtgtaatcgacttctcaaatatttgtttattgagttgggagttcttaattattgaggaggtagctgcgtgcgttttgatttttttcttcttctttgaaatactacaatatggcatgtaacaacactgatgtcgggagaaaggaacgaaaggaaaggaaagcagccaaggccaaactaaactcaaagctaggtttgctggaacatatatatagaagtccaatccttctatttgcatgatagaggattattcgcgttt

SEQ ID NO: 51910 - DNA, 315 bp, Glycine max
  Clone ID: LIB3167-020-P1-K1-B10
cccacgcgtccgagggggtcactattattccagcggtgacatttgggctgtttttgggtcgcaaggtgtctttgatccgagccatcatgtacatggtggctcagtgcttaggtgctatctgtggagatggtttggataaggctttccaaaagtcttacttcaacaagtatggtggcggggctaattccctcgctgctgggtacagcacaggtactggattgggtgctgagattattggaacctctgttttggactacactggattgtgtgacactgaccctaacaggaatgccagagattgccatgtgccggttt

SEQ ID NO: 51911 - DNA, 319 bp, Glycine max
  Clone ID: LIB3167-020-P1-K1-B11
cggacgcgtgggcgagtttcaatttcctctattatctttgttgctttccatgtaaccccacctcttatccatatatatccattcttcttcctcacacttgtttaatttgcacaaatatattatactccaaataaaccgtctcataatggaggagtcaggggaaaattggccttccgataattcttatctggatgaggtcaacgatgaatttggtagtgaagatgaagagggaggttcattttctggaatgggcgagaccgacagaaagaagagaaagcgagaactcgcagagaggttccttgcactttcagccaccata

SEQ ID NO: 51912 - DNA, 174 bp, Glycine max
  Clone ID: LIB3167-020-P1-K1-B12
cccacgcgtccgcccacgcgtccgaaagtgcaaaaggctccccctgtggtgttcttccctttagtgtgtcatttttttcttttaagttattctcttcagctgtcatctctgtactcaaaatatatttatggaaaatgttaaattttaattttaattacattcctgctttttact

SEQ ID NO: 51913 - DNA, 141 bp, Glycine max
  unsure at all n locations
  Clone ID: LIB3167-020-P1-K1-B2
cccacgcgtgcgtccacgcgtncgcccacgcgttcgtttctcgcttatggaatcaaatctgtatcccaagatgtcttgcctgtcttgactgatgcattcgatggaaatattttgagccttgagtttgataaaattttgctg

SEQ ID NO: 51914 - DNA, 243 bp, Glycine max
  Clone ID: LIB3167-020-P1-K1-B3
tggtggtggtggtgaccgtggttactctcgtggtggtgacggtggtgatggaggctggagaaactagggcttgatgtcgttgattagggtttatgattatgctcagtaattttagttgcgtttgagtttgagtatctatatggttttgtgtcaccgtggttcttgtttttgaccaatatatctggttgattatagtcgatttaatgaaatgataatcagaaattggcgaatcgatcctactac

SEQ ID NO: 51915 - DNA, 363 bp, Glycine max
  Clone ID: LIB3167-020-P1-K1-B4
attgaactcactgcattgagtggatttggtccaagttgagtttagaaatggatggccatcatcagaagcaaaaaaacaagtacagtataattgttcctacatataatgagcgtctcaacattggtctcattgtttacctcatcttcaagcaccttggggatgctgattttgaaattattattgtggatgatggcagtcctgatggtactcaggatgttgtaaaacagctgcagcaagtttatggagaagatcggattgtaagcagtgacatttacaaattgaattttcatatagagtcaactagtcatccatggtttattctttttttttttggggtcatctcatccccctttcattcattta

SEQ ID NO: 51916 - DNA, 123 bp, Glycine max
  Clone ID: LIB3167-020-P1-K1-B5
aaattgttacccgcctgtattaatccaacaaaaagggggcctttgaaactaaagaaaaacaatctaagtttggcccaaactgaagaaatacaaaaaaatggcttgagatcaagcctaaccacg

SEQ ID NO: 51917 - DNA, 377 bp, Glycine max
  Clone ID: LIB3167-020-P1-K1-B7
cttgcttccaagatggttctgctagagaagctctgggatgacgttgttgctggccctcaacctgagcgtggccttggcaagctcagaaaactcaccaccctcaaaactattgatgaaggagacagtagcaagctgcagaagacgttgtcgatgccgtcgacaccgacaatcccgatgactcccacgactccaacgacaccgggatccgcgcgtaaagctgacaacgtttggaggagcgtcttccatcctgggagcaactccgccacaaagaccatcggtgctcagatgtttgacaaaccacttcccaacactcccactgtctacgactggctgtacagtggggagaccagaagcaggcaccgctgaaaggataagct

SEQ ID NO: 51918 - DNA, 311 bp, Glycine max
  Clone ID: LIB3167-020-P1-K1-B8
tgatgatcaaaaaaaaaaaattttaatttaaaaaaaaaaaaaaaaaaaaaaagaaaagaaaaaaaaaaaaaaaaaaaaaaaaaaaaataaaaaaaaaaaaaaaaaaaaaaaaaaaaaaaaaaaaaaaaataaaaaaaaaaaaaaaaaaaaaaaaaaataaaaaaaatttaaggggggggcctttttaagggatcaaggttttctcccccttgtttgcgagtgataaatttttttttttggggcccaaaatttaatttttggggcggcgttttaaaaaccttttgtttggaaaacccctgggtttccccaat

SEQ ID NO: 51919 - DNA, 345 bp, Glycine max
  Clone ID: LIB3167-020-P1-K1-B9
ccaattgaaattttaaaaatgactgggataaacttaagaattcaattattgaaactgaatcagtaaacactttaattggattggccgaatggtatcaaaaaaatggagtactaactcccacttcttatttattattgcattaaccgatcaacttgctttgttatcgaacattgctttttgatttcaaaaattttccggaaaaaatttgaatctatttttatatgcgaatcaatcctactacttctggtactgacgtttctgcgctcgaaaaaaaaaatctgggacgtatcgcccaaataattggtccggtactagatgtagcttttcccccaggtaagatgccta

SEQ ID NO: 51920 - DNA, 382 bp, Glycine max
  Clone ID: LIB3167-020-P1-K1-C1
attttggtgggcgtgaagtgcgggttttattttcagctgagatgaatcccaagagagggaattttgaaacaatgaactcatcacccaagagagttatatactatgaaggtcctcataagttgtatgttggcaatctttccaggagtgcggggcctcaagacttgaaacaactttttggtagatttggtattgtagctagtgtaagggtgttgcaagatttgaggaaagggaatcgcagggtctatgcgtttgtctcttatcattcagagtcagaacgtgatgcagcaatgtcgctcaatggaacagaattttttggtcgtgtgctagtgattagagagggtgtagagagagaggactgagacctaactggatattcatattt

SEQ ID NO: 51921 - DNA, 134 bp, Glycine max
  Clone ID: LIB3167-020-P1-K1-C10
cccacgcgtacgcccacgcgttcgtctacgcgtccgcccacgcgtccgggaacaagggtgaggccactgacactcagttttcctaagcctcttgttgattttgctaacaaacctatgattctgcatcagataga

SEQ ID NO: 51922 - DNA, 296 bp, Glycine max
  Clone ID: LIB3167-020-P1-K1-C11
atcgcgagtggccgaccttttttttttttttggaacacatggagttattgagattgggaattctaacaaggccaaggcaaatatcttttaaggtagagatgatgttgaaagaagaacaccaaatctttcaaggctacaccgagtggacattgatatacagagcgcccattggcgctatttgaggctgtacgagcatggaacaactgtacaagcaccgtcggatttataactgaaagctattattcgtccgcctttggaagatgctgcttatatgcgtgaagacgagaaagctgcta

SEQ ID NO: 51923 - DNA, 382 bp, Glycine max
  Clone ID: LIB3167-020-P1-K1-C12
caagcaaccatggcaatggcaacccaagcctctctcttaaccccacccctctccggtctcaaagccagcgaccgcgcctccgtgccatggaagcaaaactccagcctctccttctccagcccgaagcccctcaagttctccagaacaatcagagcagcagccgccgacgagaccacagaggcaccagcaaaagtagaggctgcaccggtcgggttcaccccaccagaacttgacccaaacaccccttccccgatcttcgggggcagcaccggcgggctcctgcgcaaggcacaggtggaggagttttatgtcattacgtgggactcacccaaagaacagatctttgaaatgcccactggcggcgccgctatcatgagggagg

SEQ ID NO: 51924 - DNA, 383 bp, Glycine max
  Clone ID: LIB3167-020-P1-K1-C2
cccacgcgtccggcaacccttgataaactcagctttcgtgatccaattgctcggggaatagcaactgcttctagtgcccacgggcttggaacagcagctttgtctgccaaggaacccgaggctctcccattttgtgccattgcttatgctctgaatggtatatttggatccatactttgctcgattcctgctgttagacaaagtttgcttgcaattgttggctgagactgtcatttatgtcacggcctggtgctattcattccattcaatgccataataactccagtgcttatctgttggctgcacaaaaatgtatagggcaatattatgaatcatatattcagtaacaccattgtgtcaattgtatagaaagcaatagtcca

SEQ ID NO: 51925 - DNA, 392 bp, Glycine max
  Clone ID: LIB3167-020-P1-K1-C3
tccgaaaagattctaaagaaatataacttaatatttctttagaataatcacaaaagaatattaagattcaaataaattttagaatagaaaaaagacttaaaaaggaggatttgaaatgcgagatctaaaaacatatctttccgtggcaccagtagtaagtactctatggttcggggctttggcgggtctcttgatagagatcaatcgtttttttccagatgcattgatattccctttttttttcattctagttattgacacggaaaggggtgaagaagattatagatccaattaagtattaaatatatgtaattaatatgtaattaatctcctcttctttatttcgtcttttatttcttcttttttttacaattgtaatagaatatgaaaat

SEQ ID NO: 51926 - DNA, 393 bp, Glycine max
  unsure at all n locations
  Clone ID: LIB3167-020-P1-K1-C4
tccggttgcattgactctggttacagaaaaacacggtagtgaaaacatgnaatactaccccgagtgagatgacttcgatttaacctccctctgttgatggctgaaactcaattgaagtgattcactggactactttatcatcttggtctgaggttgaagctatttaatttctgaatttccgtgagtttcttaatccctgagtatggccgggagccaagatcagttagagatcaagtttcggttgagtgatggtacggatattggccccaaaagttattctgctgctactagtattgtaacactaaaagaaagtgttcttgctcaatggccaaaagataaggagtatggaccaagaactgtaaaagatttgaagttaattagtgctggaaaagt

SEQ ID NO: 51927 - DNA, 363 bp, Glycine max
  Clone ID: LIB3167-020-P1-K1-C5
ccacacgtgcgcccacacgtgttttttaacagggtggaagaaacccaaaccttagagggcgtgtcaaagcatgcacagggtccacgccttcttgggaggttcaccactggcagagttgaggagttcattcatgccaaaacactctcagctgcggacctccgtgaccctgaaatatctgctttgatagcatctaagatgagggagtttcacaatcttcatatgcctggtgcaaagaaggctcagctttggcagagaatgaggaagtggcttagtcatgccaaaagtttgtgctcccctaaagaaaccaagaattttggcccggacaatctatatgctgaaataaatatgcttgtggagttggta

SEQ ID NO: 51928 - DNA, 386 bp, Glycine max
  Clone ID: LIB3167-020-P1-K1-C6
gccaccgcagcctccagctacgcggctgccctggccgacgtggctgccgcgaacaacacgctcgacgcgacaaccgcggacatcgagaaaatcgacgagatattctcggaggcgcaggtgtcggactacttcgccaaccccaccttggccgtggagaagaagcggaagctgatagatgagattgcggaatcttcggggttccagccccacacgagaaacttcctctacatcctcgtggacgcgcagaggatcgacctcatcaacgagatcgcaaaagagttcgaattggtttacaattccttgaccgacacggagctggcggtggtgacgtcggtggtgaagctggagtcgcagcacctggcgcagatcgcgaagcaggttcagaa

SEQ ID NO: 51929 - DNA, 371 bp, Glycine max
  Clone ID: LIB3167-020-P1-K1-C7
aaaactgtttctctatgcgtgaaacggctgctcaaatttcttgtgtgacctgaagccaggagctgaagtaacaataactggacctgttgggaaagaaatgcttatgccaaaagatccaaatgccaccatcatcatgttgggaactggaaccgggattgccccatttcgctcatttttatggaaaatgttctttgagaagcacgaagattacaagttcaatggtttggcatggctcttcttgggtgtccctacaagcagctcattgctttacaaggaggagtttgagaagatgcaagagaaaagtcctgaaaacttcaggcttgacttcgctgtgagtcgagagcaaacaaacgagaaaggggagaagatgt

SEQ ID NO: 51930 - DNA, 203 bp, Glycine max
  unsure at all n locations
  Clone ID: LIB3167-020-P1-K1-C8
gtttgaaaccttgataaatagttgttccagattggcatcaaaagtaagaaggtgcacaattcgaccttctccactataatttgcaatgacatatatcaaacagtgataccaactaggagtgacatgcagcaaattcacactgcaaaattcacaattaagagtttcattgttgaaggtggaagagaatntccatgaagaaaaac

SEQ ID NO: 51931 - DNA, 363 bp, Glycine max
  Clone ID: LIB3167-020-P1-K1-C9
cccacgcgtccgcttctcttccctctgccgccgcaccctgcaaattcaatggcttcagagaagaaactatcgaacccaatgagggaaataaaggtgcagaaactcgtcctcaatatctccgttggtgagagtggagatcgtctcaccagagccgccaaggtgttggaacagcttagtggccaaaccccagtgttttccaaagcaaggtacactgttcggtcctttgggattagaagaaatgagaagattgcatgctatgtcactgttagaggtgataaggctatgcaacttttggagagtggtttaaaggtgaaggaatatgaacttctcagaaggaactttagtgatactggctgcttcggc

SEQ ID NO: 51932 - DNA, 380 bp, Glycine max
  unsure at all n locations
  Clone ID: LIB3167-020-P1-K1-D1
attccataaacgggtggtgcctctcttccatttccccagccaaaacctctctcagggaggccacattacgcccttccgtcttcgcaacccttaacactccttcttctccttcctcttcatcttccttcccctctctgattcaagacaggcctgtttttgctgcccctgcccccatcatcaccccaactgtgagagaggatatggcaaaggaatacgagaaagctattgaagaacttcagaaattgttgagggagaagagtgaactcaaagcgacagctgctgaaaaagtggagcagataacagcttctctagggacatcataatctgatggcatcccatcatcagaagcctnagacaggatcaaagctggtttcattcac

SEQ ID NO: 51933 - DNA, 375 bp, Glycine max
  Clone ID: LIB3167-020-P1-K1-D10
cccacgcgtccggcaaaaatgagggcacttggagaggagattggcattcctatcgaggtttatggacctgaggcaacaatgactggtatatgcaaacaggcaatccaatgcatcactgctgctgcttaattatccattcttaggccaatccctttttttacatgtatttttcatggctagtttgaagtgattgttgattcttggttccctttccaactctcagaattggtaactttggtgagttagagcataggatgttataaaacagtcatttagtcatccaataaagtggtcaagagggttttgtatcgtctagaattctgatagtacagtcttggcacaataaactggaatgtgtaattgttttatgttatg

SEQ ID NO: 51934 - DNA, 380 bp, Glycine max
  Clone ID: LIB3167-020-P1-K1-D11
cacacacttcaatttatcagcatggcctccgttcagtgccacaaaacctgcaaagtgagctgccaacaggaaaaccagcacgcctcgtttgggcagaaagtttctgacttgttcaaagggcatcaacataatgaccacagctccaattatgccacccaaaccaaagtgctttcccagtcagggtcagggttaggccccttcaccaccaaaactcaaacacaatgcggttgcccccaaacacatctcagtaccactcatggctccaacacaaaaggccatggccatggccaagggagaattaagagggagcacaagagagggatgctgcagaacatcaaggatcgcttatcaggtgacaccagcagcgacagcgagagcga

SEQ ID NO: 51935 - DNA, 380 bp, Glycine max
  Clone ID: LIB3167-020-P1-K1-D12
aaaaagttgtgctgtgccgcctcttccgtaggcagcagcaatggcctcaaatcccaaaactttgacctttgaggaggtagctaagcacaacaacaaaaaggattgctggattattatcaatggaaaggtgtatgatatcacaccatttttggatgagcatccaggaggtgatgaagttttgctgacgtcaacagggaaggatgccaccattgattttgaagatgtgggccacagtgattctgctatagaaatgatggaaaaatacttcattgggaaggttgacacttccactcttccacccaaagttagccatagtctgccacaacctacacaaacacatggcgctggcaatcaatcttctggatttgttgtaaagatct

SEQ ID NO: 51936 - DNA, 373 bp, Glycine max
  Clone ID: LIB3167-020-P1-K1-D2
tgaagagctccagcacgatggcttccctctctacattgctcccgaacccgaaccttatttccaagcacaacagcaccctttcttccactcacccatgtgcttattcctggaaaaacaaaaccccaaccagtaagggtcggttctccgtttcttgttcttcttcgtctcaagcatacgacgtcgtcgtagttggcgctggcgtcattggcttaaccatcgctcgccacttcctcgtttcttccgacctttctgtcgccgtagtcgataaggctgtcccttgttccggtgccactggcgcagggcagggacatctgtggatggtaaacaaaacccctgggagtgctacgtgggatcttgcgtcaaggagtcatca

SEQ ID NO: 51937 - DNA, 383 bp, Glycine max
  Clone ID: LIB3167-020-P1-K1-D3
attacaataaaaacactcaaaagaggagaaaaaaagaagaaaagaatggtaacaatagctggtggtgtgagtctttcaagccctagcagggtatttgctaatgctaagggaatagactcagcacaaaaggcccaggccgtgaggtttccagctctgtcgaggcccattcaaaagtggcctggtttggtgaagacccggcccgttcgggcgacgccggagaagatatcggagaaggtagaggagagcataaagagcgcggaggaggcgtgctcgggaggcggcggtgacgcggaatgcgcggcggcctgggacgaggtggaggagctgagcgcggcggctagccacgccagggagaagcagaagcagtctgacccgctcgaaaa

SEQ ID NO: 51938 - DNA, 370 bp, Glycine max
  Clone ID: LIB3167-020-P1-K1-D4
cccacgcgtccggagaagggctacacaaacacaatctctaatggcactcaggatgtgggctgcttccactgccaatgcactcaaactctcttctgtctccagacctcatctcttgcctcctttttctttctccagatgcttatcttccgtcttggatggacttaagtacgctgattcacatgaatgggtcaagcacgaaggctcagtcgccaccattggtatcactgaccatgcccaggaccatcttggagaggttgtgtatgtggagctgccagaaccaggtggcacagtttccaagaagtctggcttcggagcccgtgaaagtgttaaagcaacaagtgatataaactctccaatctcgggggagatc

SEQ ID NO: 51939 - DNA, 384 bp, Glycine max
  Clone ID: LIB3167-020-P1-K1-D6
cccatttccgttaccgttatcctcacttctctctctctcaacctcttatttatttattaaccctttattccacccctttcctctcccttcatcaagcacccaactttctgccacccccacaaaagggtgcttgcgtttctttctgtgatctcaaccatgaagcgtccactcacaccttcagccagcggcatgaagactaacaagaaagccaaggcgatggaaaatgacgaagacgtggaggggctggggcgtttcgacgacaaccttctgttcgaggtgttgaagcacgtggacgcgcggacgctggcgatggcgggatgcgtgaacaaacagtggcacaaaactgcgcaagaccagaggctctgggaactgatctgcacaaag

SEQ ID NO: 51940 - DNA, 377 bp, Glycine max
  unsure at all n locations
  Clone ID: LIB3167-020-P1-K1-D7
ctctccctccctcaaatcccaaaccagcaaaaacctttcttcacaaaatggcctcaacaactctaacaaccctcaccctccgcacgctatcttatcctacaccctcctcttcttaccctacgcacctctccgccaaaccctcctccctccaattccccaatctctcccaccgcgccgtcaccacgcgccgnccccgtgtcgtcgtctccgccgttgaggcgccggagaaaatcaccaagctcggcgacgaaatcgccggactcacgctcgaggaggccaagaacctcgtcgacttcctccaggacaagctcggcgtctccgcggcggcgttcgcccctgtggcagtcgccgcgggtgccggcggcgctgtggcggac

SEQ ID NO: 51941 - DNA, 381 bp, Glycine max
  Clone ID: LIB3167-020-P1-K1-D8
cttcactctattctataaattggaatcactgctcctcataacctcaaaagagttcaccaaaccaacacctttcaaaatgcaaacatccttaacctttgctgcccccaacgttgtgcctttggcacaaacaaagagtttctcccatgttgccatcttccctaccaatttgaaagccccacgctcttcacctcgttactctccgatcagggttgcaatcgtggagcctgacacttcaactgtggactacaactctgcgttctcagtgtttccagcggaagcatgcgaaactgttggaggggaagcctgcatggcagaaatgtaccctgaagtgaagctacagccagaagctaagacaccacgagttgttacagagaacgttga

SEQ ID NO: 51942 - DNA, 377 bp, Glycine max
  Clone ID: LIB3167-020-P1-K1-D9
gataactagaaacagtgtgatgaaaatgaaggtccttgttttcttcgttgctacaattttggtagcatggcaatgccatgcgtacgatatgttccctctccgaatgaacactggctatggtgcccgtactccggaggtgaaatgcgcaagttggaggcttgctgtggaagcacacaacatctttggctttgagaccattcctgaagagtgcgttgaagcaacaaaggaatacatccatggcgaacaatatagatcagactccaaaacagttaaccaacaagcttacttttatgccagagacctcgaagtccatcccaaggacacatttgtgttcagtatagatggcaccgtactctctaatattccatactacaaaa

SEQ ID NO: 51943 - DNA, 381 bp, Glycine max
  Clone ID: LIB3167-020-P1-K1-E1
cccacgcgtccgcgcatcacacacaaacaaacactcccattctctctctctctctctctctccgacctagcgagaccgagcgatccgaccctaatctcgcgatgctccgacgcgcaacctccttcgtgctcaccggcgcctagcgccgtcgcctattctgcgacgtgccggcgacccccgccgcggattccgccttcgcggaggcgtggaagaaagtgagccccaacatcgacccgccgaagacgccgctggcgtacatgaagccccgaccacccactccctcggctcttcctttcaagctcacagtcaacttcgtcttgccctactcttctcaattggccgcaaaagaggttgatatggtcatggtaccagcaacaactg

SEQ ID NO: 51944 - DNA, 333 bp, Glycine max
  Clone ID: LIB3167-020-P1-K1-E10
cccacgcgtccgcccacgcgttcgccctcgcgtccgctcttcttcagtggtggaagcgtactagaacactagtttgttgagcactgcgatgaggaagtggacggttgcttccgctctccttcttctctctctcctctttctctttgcagatcaaggtcgaaagtttcaggcgaatgccgagggagattccgacgagcttgtagatccacccaacgcggaggacaagatcggtgctgtgcctcatggcctttcaaccgattcagatgtcgtcaagagggaggcggcgtcgatctcgaagagatctttccggagcaacgcggagaagtttgagtt

SEQ ID NO: 51945 - DNA, 137 bp, Glycine max
  Clone ID: LIB3167-020-P1-K1-E11
gcttggatgagcttaacaacaaaccacatctgaagaaggttccttccaaagccaacccaatggtgctgctgctgccaagtgaaccttttatggttggcggattttagttttcaattggagtagtttcttccttgtca

SEQ ID NO: 51946 - DNA, 345 bp, Glycine max
  Clone ID: LIB3167-020-P1-K1-E2
cggacgcgtgggcggacgcgtgggcgcgggtgaggtagaacccttccacggtggtgactgcgcgatgggtgcctacaagtatgtttcagagctatggcgcaagaagcagtctgatgtcatgcgcttcttgcagcgggtgaggtgctgggagtataggcagcaaccttccattgttcgcttgacaaggtcgacccgccctgacaaggctcgtcgcttgggcttcaaggctaagcagggctatgtgatataccgtgttcgtgttaggaggggtggccgtaagaggccagttcccaaaggtattgtttattgtgagcccacaaaccagggtgttacccaactgaattt

SEQ ID NO: 51947 - DNA, 303 bp, Glycine max
  Clone ID: LIB3167-020-P1-K1-E3
cggacgcgtggggcgcttggtgggagtgctcttgctgtgttttggacgaacagaccaattcccctcgatgacaaagatgacttcaagaaatgaaaatgtgtaacttctatgcatattttcttttgtaggaaaaattttttattagttgttttgagaaaaaaaatgatttctgaattcactttagtagtcactcacacatgttagaacattaagaatttaggatgagtctataacagggagtgtggcaaccccttactttgagaatcgcactgcgatttttacttttttaggttttatagcttg

SEQ ID NO: 51948 - DNA, 287 bp, Glycine max
  Clone ID: LIB3167-020-P1-K1-E5
ggcactcgttccaccacgcgtactatttctcgttcgctctttttcagtggtggaagggactagaacactattttgttgcgcactgcaatcaggaagtggtcggaaagttccactcttccaaaagagtgcacgcctgtccaaaaatgttacattggactctccaagcaagtcaaggagaagcttggggctgttgatccctactttatcaagctagcagatgccatggttacttggattgaagcttgggatgagcttaacaacaacacatctgaagaagttccttcaaa

SEQ ID NO: 51949 - DNA, 168 bp, Glycine max
  Clone ID: LIB3167-020-P1-K1-E6
gtcacgcgtacgctctatacttgataatgtttaactcccgatttctttctacaccaaagggggctgtgtgactaactaaaaacaaactatgattggggccatctggagatacacaaaaatatggtttgtgatcaagcctaaccacgctggaggtaatttttgacaatt

SEQ ID NO: 51950 - DNA, 350 bp, Glycine max
  Clone ID: LIB3167-020-P1-K1-E7
caaaaaatcaatccagatatttggtcggaacttgttctggtatgctgctgtttttggaactataactgctattagacgggctgcaattgcagatgagcttctagtcatagaccccgaaggagcaatgtcaatggtagttgagcatacgcattatatgcccaagagatggcggggcaaagaaagtactgaaatggtccggattgagtttgaaaccttattccagtatagtgggatgatgttacttgaggagatggcctcgattttccttactccatacttacttctgttggttgtcccaaagcgggttgatgatatcttgcaagttattgcagattttactgtagatgttg

SEQ ID NO: 51951 - DNA, 378 bp, Glycine max
  Clone ID: LIB3167-020-P1-K1-E8
cccacgcgtccggagataactagaaacagtgtgatgaaaatgaaggtccttgttttcttcgttgctacaattttggtagcatggcaatgccatgcgtacgatatgttccctctccgaatgaacactggctatggtgcccgtactccggaggtgaaatgcgcaagttggaggcttgcttgggaagcacacaacatctttggctttgagaccattcctgaagagtgcgttgaagcaacaaaagaatacatccatggcgaacaatatagatcagactccaaaacagttaaccaacaagcttacttttatgccagagacctcgaagtccatcccaaggacacatttgtgttcagtatagatggcaccgtactctctaatatt

SEQ ID NO: 51952 - DNA, 372 bp, Glycine max
  Clone ID: LIB3167-020-P1-K1-E9
gtgagctataagctagtttatcgtgaggagaatatgaagttgtttgttttctttgttgctgcagtagttttggtagcatggccatgccatggcgcaggctaccaaaggttccctctccgaatgaaaactggctatggtgagcgttcttcggaggtaaaatgcgcaagttttaggcttgctgtggaagcacacaacatccgagcctttaaaaccattcctgaagagtgcgttgaaccaacaaaggactacattaatggcgaacaatttagatcagactctaaaacagttaaccaacaagctttcttttatgctagtgaacgcgaagtccatcacaacgacatatttatattcggcatagataacaccgtactc

SEQ ID NO: 51953 - DNA, 376 bp, Glycine max
  Clone ID: LIB3167-020-P1-K1-F1
agtgagtctacgtgtttgagagaaaggttgagctatagcctaaagggagagacacataaatagtttctactttctattcatagatagatggctggcccaattatgagacctcagattgtgctatttggctcctccataattcaaatgagcttcgacaatggtggttggggtgctattctagctaacttgtacgctaggaaggcggacatcatcttaagaggatactctggttggaattcaaggcgggctttggaggttttggatgaaattttccccaaggatgcttatgtgcaaccatcattggtaattgtgtattttggtggcaatgattctattgatcctcacccatctggccttggtcctcatgtaccccttg

SEQ ID NO: 51954 - DNA, 380 bp, Glycine max
  Clone ID: LIB3167-020-P1-K1-F10
cccacgcgtccgatcaaagccatggccacctccaacttctctattgttctctccgtctccctagccttctttttggtgctacttaccaaggcacactcgaccgataccgtttctttcaccttcaacaagttcaacccagtccaaccaaacattatgctccaaaaagatgctagtatttcatcctctggggtgttacaactcaccaaagttggcagcaacggcgtgcccacctcgggatctctcggtcgtgccctttacgctgccccaatccagatttgggacagcgaaaccggcaaggtagccagctgggctacatcctttaaattcaacattttcgcacccaacaaatcaaactcagctgacgggcttgccttcttctt

SEQ ID NO: 51955 - DNA, 371 bp, Glycine max
  Clone ID: LIB3167-020-P1-K1-F11
ggtgaacgtactcgtgagggaaatgatctttatatggaaatgaaagaatctggagtaattaatgaacaaaatattgcagaatcaaaagtagctctagtatatggtcaaatgaatgaaccgcccggagctcgtatgagagttggtttaactgccctgactatggcggaatattttcgagatgtcaatgaacaagatgtacttctatttatcgacaatatctttcgcttcgtccaagcaggatctgaagtatctgccttattgggtcgaatgccttctgctgtgggttatcaacccactcttagtactgaaatgggttctttacaagaaagaatcacttctaccaaagaggggtccataacttctattcaagc

SEQ ID NO: 51956 - DNA, 271 bp, Glycine max
  unsure at all n locations
  Clone ID: LIB3167-020-P1-K1-F12
aaaaaagttgtaagggtggctggaaatacagcttttcattttgccccccccccgggatatttttgtcangaagaacactggacaaacaggccgtaacagaagcaaacttaaagaaggctggctaccacacatgggaaaaattaattctcaaggatccacaagatccttccactccaaatgcagtttcatacaaaacagcaacgagagagaaactgataaggcagggatacaacattgttgggaacatttggagaccaatggagcgatcttc

SEQ ID NO: 51957 - DNA, 373 bp, Glycine max
  Clone ID: LIB3167-020-P1-K1-F2
ggaccggatgtgggtgcccaagtggggcttgggtttgacccacttggctggggaggtggttctcctgagaagatcaaggagttgagaacaaaggagatcaagaatgggaggttggccatgttggctgtgatgggggcatggttccagcacatttacactggcactggtcctattgacaacctctttgctcaccttgcagatcctggccatgctactatttttgctgctttcactcccaagtgagaagtgttggaacaactctatgattgcaagccttggagaaacattggcaaacctttttaactaagttgtaacgcttaaatggttttaggtgggagtgtttatgttggtgaaagcttgtaaaatggctact

SEQ ID NO: 51958 - DNA, 378 bp, Glycine max
  Clone ID: LIB3167-020-P1-K1-F3
cgcgtccgcccacgcttccgaaaataaaagccatgtcacacctccaacttctttatggttctctcggcctccttagccttcttttgggtgctacttaccaaggcacactcgaccgataccgtttctttcaccttcaacaagttcaacccagtccaaccaaacattatgctccaaaaagatgctagtatttcatcctctggggtgttacaactcaccaaagttggcagcaacggcgtgcccacctcgggatctctcggtcgtgccctttacgctgccccaatccagatttgggacagcgaaaccggcaaggtagccagctgggctacatcctttaaattcaacattttcgcacccaacaaatcaaactcagctgacggg

SEQ ID NO: 51959 - DNA, 392 bp, Glycine max
  Clone ID: LIB3167-020-P1-K1-F5
gtccgaggggtggttaagttttggcctgtggtcattgcaatatgcaaagcgagttctccgatgcgaagaagcgcatagaggaggacaaccctcaaacactcgttttcctcgtacacgacagtgagaagaagaagagaaagagaaagagaaagaagaaaatcgaggaatcaaacgagcagccccaggttgaggtatgccctaaatccttagtagactcggttatcccaattgttgcacaaaaaggaaaatgctgaaaccaccacagagaattctaacccaacccccaagaaaaagaagaagaagaagaataagaatgtgcaagatgcagagcaacttctgacttgtgatccttcaattgcgattggtgcggtacctgatgttacgaaagaagg

SEQ ID NO: 51960 - DNA, 149 bp, Glycine max
  Clone ID: LIB3167-020-P1-K1-F6
cgtgaacgtactcgggaggtttaagatttttacacgggggggtgtctttgggctggaagatttttttcttgtggggaagaacactggacaaacaggccgtaacaaaagcaaacttaaagaaggttggctaccacacatgggaaaaatta

SEQ ID NO: 51961 - DNA, 356 bp, Glycine max
  Clone ID: LIB3167-020-P1-K1-F7
cccacgcgtccgtgtctctctgaatcttatgtccacactttgcgaggctctgcacagtcctcacaccatcctgtgtctgtgagtttgtgcctttcttcatgtgcattcacactttgtaggaccaaacacgtgtttctcatgaatctcaaatatgccgagtaaaggccagacaccaacattggcctctgcaccagaagcagattgtttcctcgacgatggggaagaaaggagggagctggctctcgtcggcgaacaaagtgctcaagtgctattctaaggactcgcacgcgcctgagaagacgaacgagatcatgggcgagcagtggcagcagcatgtggcgccagaggaggattct

SEQ ID NO: 51962 - DNA, 380 bp, Glycine max
  Clone ID: LIB3167-020-P1-K1-F8
acgaggtatgggacactctgtatacgtgaaaaccctggatgtcttttcattgctacaaaccgagatgctgttactcatctcacagatgctcaagaatgggcaggtgggggctcaatggttggcgctctcagtggatctactcaacgtgagccattagttgttggaaaaccctcaacgtttatgatggattacttggcaaacaaatttggcatttcgaagtcacagatatgtatggttggggacagattagacactgatatcttgtttggacaaaatggtggttgcaaaactcttcttgtgctctcaggggtcaccacactggccatgcttcagagccctaacaactccatacagccagacttttataccaataaaatttc

SEQ ID NO: 51963 - DNA, 310 bp, Glycine max
  Clone ID: LIB3167-020-P1-K1-F9
gaattcatcaaccgtgtgttaattggacgaacaatttgagaggatcgaatgttgttggcggtcatgttgaggaaattgacaaggcaattagtgagtattcttaggaaatgggcatcaagtcgatttactagtctatgtagtagcaggatcttatagtttttggattattagaagcacaactatgggtttttgtgatgtatgttgtctaatcaaatacttcaaggatggtatcgtaggattagcatttcaactgcccggttaccaatgcatgtaaagtgatgaatgatacattcatcatcgacatagtaca

SEQ ID NO: 51964 - DNA, 289 bp, Glycine max
  Clone ID: LIB3167-020-P1-K1-G1
caaaatattgtgtggattttttcctaattaagtgaaagggtagttccacctttttgtagggttttaccacttttgtgtgccagagttttctgagtttcataggagaaaaaaaatgacagaagaacaaaccaaaacggctgagtcagaatcagtgacaccaccacctgctgctgctccttcacaggctcctccagctgctgaggctgaacatgttcctgaggcttcaaaggatgtggctgaggagaaatctgtaattccagtgccttcttctgatgacaaacctgatgag

SEQ ID NO: 51965 - DNA, 250 bp, Glycine max
  Clone ID: LIB3167-020-P1-K1-G10
cccacgcgtccgaagacacagccattgtttgtttactttccattgattgggccaaaggtttggtttttcttccaaccatttccaatggggtggaagaaagtctcaacctttagtcgaaagagcaaggatctgagtgagggagcgatcatgtgtggtggtgcgattatctccgacttcattccagcgggtcccgccgccggggcgcaccgcgtgaccgccgacatcctgtggccgaatttgaggaagcggt

SEQ ID NO: 51966 - DNA, 377 bp, Glycine max
  Clone ID: LIB3167-020-P1-K1-G11
aattagttcattctctttgcgcagttttttacctctcctttcaagatgcagatcttggtcaagaccctcaccggaaagaccatcacccttgaggtggaaagctctgacaccatcgacaacgtcaaggccaagatccaggacaaggaaggaatttccccggatcagcaacgtctcatcttcgccggaaagcagctcgaggacggtcgtaccctcgccgactacaacatccagaaggagtcaacccttcaccttgtccttcgtctccgtggtggcatgcagatcttcgtcaagactctcactggcaaaaccataaccctagaggtcgaaagctctgacaccattgacaacgtcaaggccaagatccaggacaaggaggg

SEQ ID NO: 51967 - DNA, 263 bp, Glycine max
  Clone ID: LIB3167-020-P1-K1-G12
ctttgttattacctctttccaaagtttaaattttctagttccaccaaaccaaaccgggccaaaatggcaggaggcttaagcttattcctggtattaacaccaggcctatattaaccattcaaaagcaccattatttggagccattcaacgtgtgcttccaaggtcttagacccctcgcaaggttcaccaaagcctcattaaccaaagtgagcgccaccacccaaagggttattctaaaggggggtgttagagctgtactcaac

SEQ ID NO: 51968 - DNA, 236 bp, Glycine max
  Clone ID: LIB3167-020-P1-K1-G2
ctggtttctttcgtggttccaattttggaggcatggcattgccatgcgtccgatttgttccttttccgaatgaacactggctatggtgcccgtcctccggaggtgaaatgcgcaagttggaggcttgctgtggaagcacacaacatctttggctttgagacctttcctgaagagtgcgttgaagcacaaaaggaatacatccatgggcgaacaatatagatcagacttcaaaacag

SEQ ID NO: 51969 - DNA, 373 bp, Glycine max
  Clone ID: LIB3167-020-P1-K1-G3
tggcccagcacaaacagtatggggggatagggacactctcagacaacaacattggcggggagaaaaatgtctctggtggcgaacgaggatttccagcacattctgcgtgtgctgaacaccaacgtggatgggaagcagaagataatgttcgctatgacctccatcaagggtattggaaggagattcgccaacatcgcttgcaagaaggccgatgttgacatgaacaaaagggctggtgagttgagtgctgcagagttggatagtgtgatgactgtggtggcgaaccctaggcaattcaagatcccggattggtttttgaacaggaagaaggattacaaggatggaaagtactctcaggttgtgtctaatgctc

SEQ ID NO: 51970 - DNA, 228 bp, Glycine max
  Clone ID: LIB3167-020-P1-K1-G4
gagaaacaaagttagaagtaaagaagatcatggcttctctagcaaccttggctgctgttcaaccagctacgatcaatggccttgctggaagttccctctctggaactaagctctctttcaagccctctcgccacagtgtcaaatccaagaacttcaggagtggtgccgtggtagcaaagtatggtgacaagagtgtgtactttgatttgaggatctggcaacactaca

SEQ ID NO: 51971 - DNA, 334 bp, Glycine max
  unsure at all n locations
  Clone ID: LIB3167-020-P1-K1-G5
aaaaaagattctaaagaaatataactaatattttttagaataatcaaaaagaatattaaattgaaataaattttagatagaaaaaagacttaaaaaggaggatttgaaatgcgagatctaaaaacatatctttccgtggcaccagtagtaagtactctatggttcggngctttggcgggtctcttgatagagatcaatcgtttttttccagatgcattgatattcccttttttttcattctagttattgacacggaaagggggtgagaagattatagatccaattaaagttttaaatatatgtaattaatatgtaattaatctccctctcttat

SEQ ID NO: 51972 - DNA, 291 bp, Glycine max
  Clone ID: LIB3167-020-P1-K1-G7
cgcagagtagagcagcacagaagagggtaaaacggcaccgccgccgtagaagaaaacaaccatggtgcacgtctgcttttacaggaactatgggaagacattcaagaagccgcgtcgtccgtacgagaaggagcgtctagacgcggagttgaagctggatggtgagtacgggcttcggtgcaagagagagctgtggagggtgcagtacgcgctcagagcgatgcgcaacaacgcgcggagcctccttaccctagacgagaagaacccgcgccggatcttctagggagaggc

SEQ ID NO: 51973 - DNA, 83 bp, Glycine max
  Clone ID: LIB3167-020-P1-K1-G8
gtactagttagcgttccatcttgtatccttgatatcttacattcccggatatgtcattaatcgcatatgaagattatttaagc

SEQ ID NO: 51974 - DNA, 377 bp, Glycine max
  Clone ID: LIB3167-020-P1-K1-G9
gtgatgactaaggagcagggtctgcgtcaactggaggaagccgaaattgatgccatcgttgctgagatcgaagcggagaaggcagctgcagaggctgctaagaaaggcccctcctaaggagacataattttctgttttgtgttatgcgagcattgttcttgctaggtattggctgtactcactgaagctaaaaattgatgccattgtgtctgagattgatgcaaagaaaacggctgctgaggctgcaaagaataccctttctaaggagacatgattttatgttacttttatttagctcgtgaattgttcttgctagatgttggcctaacttaaaatgactgctttattggttttgggtactgccattagtgttggtc

SEQ ID NO: 51975 - DNA, 166 bp, Glycine max
  unsure at all n locations
  Clone ID: LIB3167-020-P1-K1-H1
ccgcccacgcttccgttttttttttaagttttatttnannnaggccatacaatttatgggcgctggtttttttcctttctttcacaccccccatttgtcttcccccccaaaaggaaaaggttccccttaattcaaattattaaaaatttttgaggggtggggttca

SEQ ID NO: 51976 - DNA, 338 bp, Glycine max
  Clone ID: LIB3167-020-P1-K1-H10
gcaaatggtgacgaaactgattctgatctcatggttggaggatatcgatggtctggaggctagaatcctctaactgagaaactggtgcgcacgattggaatacctctgcctcttgaacatgtggaggtgctagaggaaaacctggactgatgagatattcagtggtcacagaactggcgtctcgattgcaagaaaggaatatacccttgctctagagcattgcttgataaataatcatgtcattctcctgagtttgactgcaatggaggggggatagaaaggggacgggtgctgggatgatatgcagcaactatgctgttaacatctagcaataagag

SEQ ID NO: 51977 - DNA, 82 bp, Glycine max
  Clone ID: LIB3167-020-P1-K1-H11
cccacgcgtccgcccacgcgttcgtattttggtttctgttttcggacttcaatgggaattaatggatgagaactaatgaatt

SEQ ID NO: 51978 - DNA, 89 bp, Glycine max
  Clone ID: LIB3167-020-P1-K1-H12
cgacccacgcgttcggccacgcgtacgcccacgcgttcgggttgagactcttctcttcttcaaacctcaaaggcctacacacaacactc

SEQ ID NO: 51979 - DNA, 391 bp, Glycine max
  Clone ID: LIB3167-020-P1-K1-H2
cacgcgtccggaagagttgaaagcattgcaagtagatacaactcgtgttgggcctttcaaaggatgaggctcagaagaaaccatacattgcttccatgggagtgtacgtcttcaagaaggagatacttcttaatctattaagatggcgatttccaacggcaaatgattttggatcagaggttattcctgcgtcggctagagaattttacatgaaggcttatctcttcaatgattactgggaagacatagggactatcagatccttcttcgaggcaaatcttgccctcactgagcatccaccaaggtttagcttttacgatgcagcataaccaatgtatacatcaaggagaaacttaccaccatcaaagattgacaatagcaagattgttga

SEQ ID NO: 51980 - DNA, 385 bp, Glycine max
  Clone ID: LIB3167-020-P1-K1-H3
aagcctttctttcccactcactcactcacaggtaagcaatggcgggaaaaggagggaaggggcttcttgcagcgaaaaccaccgcggcgaataaggacaaagacaaggacaagaagagacctatttctcgctcttcccgtgctggaatccagtttcctgtgggacgtatccataggcagctgaaacaaagggtccaagccaatggacgtgttggggcaacagctgcagtgtacttagcctcaattctagagtatctgactgctgaagttcttgaacttgctgggaatgcaagcaaggatctgaaggtgaagaggatcacaccaaggcatttgcagctggctatcaagggagatgaggagctggacactcttatcaaagggaccat

SEQ ID NO: 51981 - DNA, 290 bp, Glycine max
  Clone ID: LIB3167-020-P1-K1-H4
caaaagaagagggtgagaaaaagaaggtgaaaaagactaaaactgagaagtattgggactgggaattggccaatgaaacgaagccaatatggatgcgcaatccaaaggaagttgaaaaggaggagtacaatgaattttataagaagacttttagtgaatttcttagaacccacttgcacataactcacttcactaccgagggtgaggttgagttcagaagtattctgtacgttccgggaatgggacctcttaacaatgaagaagtagtgaaccctaaaacaaagaacata

SEQ ID NO: 51982 - DNA, 395 bp, Glycine max
  unsure at all n locations
  Clone ID: LIB3167-020-P1-K1-H5
taccgatccgcaaggncgccccacgcgtccgattacatgtacagtttttgctttgtattttgtatcattgctaaatgttctccggagaggagcaaagacttttgaaaaacaaaggtaagccttagctcttgtagtgtttgcatcctgggacacaagtaatgaagtaattcaatttcgtacaacaatgagtaatccccaagcatggcgcttttgtaattaacaaagcattcttaccttaatagccataaaaaagaaagcattcactttgttctctctctgcattagctttccagattggtgcctaataccttcactgaaattaatgatcgaatgcacttatcacaaactagacatgaaaaattcattagcaaactaaatagtctacatgatttttt

SEQ ID NO: 51983 - DNA, 52 bp, Glycine max
  Clone ID: LIB3167-020-P1-K1-H6
ccacacgtacgccacgcgttctattttggtttctgaattcggactccaatgg

SEQ ID NO: 51984 - DNA, 373 bp, Glycine max
  Clone ID: LIB3167-020-P1-K1-H7
cgaaaaccttcttctataaagaagaccttcatccaggcaaaacaatgaaagtacaattcagcaagcctccctttcaacaaccatggggtgttggtacatggttaaaggaaattaaagacactactaaagaaggatatagttttgaagagctatgcatcaagaaagaagccattgagggagaagagaagttttgtgcaaaatccttgggaacagtaattggttttgccatttcaaagctgggaaagaacattcaagtactttcaagttcctttgtcaataagcaagaccaatacactgtggaaggagtgcagaatcttggagacaaagcagtgatgtgtcaataggctaaatttcagaactgcagtattttact

SEQ ID NO: 51985 - DNA, 352 bp, Glycine max
  Clone ID: LIB3167-020-P1-K1-H8
aaagccatggccacctccaacttctctattgttctctccgtctccctagccttctttttggtgctacttaccaaggcacactcgaccgataccgtttctttcaccttcaacaagttcaacccagtccaaccaaacattatgctccaaaaagatgctagtatttcatcctctggggtgttacaactcaccaaagttggcagcaacggcgtgcccacctcgggatctctcggtcgtgccctttacgctgccccaatccagatttgggacagcgaaaccggcaaggtagccagctgggctacatcctttaaattcaacattttcgcacccaacaaatcaaactcagctgacgggc

SEQ ID NO: 51986 - DNA, 379 bp, Glycine max
  Clone ID: LIB3167-020-P1-K1-H9
gatggaaacaatggattgaggggtctgattcaaatccatgggagcttgcagatttcacaacaaccacctcaagagccagccgtatgctgggagagatttctcccattaagatcgataaaagttttgctggtggaagatgatgattcgacacgccatgttgtgcgtgctctgttacagaattgtagttacaaagtcactgccgtttccaatggccttcaagcgtggaaagtcctggaagatccagaaaatggcattgatcttgtcctaacagaagtagctatgcctattttgtctggaataggtcttttgtgcaagatcatgagccacaaaactctgaagaatattcctgtgattatgatgtcatctcatgattctatgg

SEQ ID NO: 51987 - DNA, 283 bp, Glycine max
  Clone ID: LIB3167-021-P1-K1-A1
cccacgcgtccgctttgctgctacatgaccattgtgctgggagaccaaactatcagagcaagttccatgcaccaaaccacagattttggctttggaagtctgaatatattggtgtatgtgaaattattaatatcattatttataaaatatatagttaaactttgttcaacaaattaaaatccttacaaagttgcaagaatgtttcaaacgacatacaaaatttaactatatattttataaataatgatattaataaaatatatagctcaattttgtatgtccg

SEQ ID NO: 51988 - DNA, 370 bp, Glycine max
  Clone ID: LIB3167-021-P1-K1-A10
cccacgcgtccgcaagaagaggttagctactactggagcaaactttgcaagagcatacaccgtggaattcggtagttgcaagttccctgagaacttcactggttgccaagatcttgccaaacaaaagaaagtgccattccttagtgacgatttggagcttgaatgcgaaggaaaggacaaatacaagtgcggctctaatgttttctggaaatggtgaaaggaggcaaccttttatgcccaactgcgaattattcgctttgcgatgtacctaactgcttgaatatataccatatttttctgcattgctttcagttattatattgttggtgttggattttagttgttgaagaaaatgtgtgaattaggcggc

SEQ ID NO: 51989 - DNA, 272 bp, Glycine max
  unsure at all n locations
  Clone ID: LIB3167-021-P1-K1-A11
cccacgcgtccgatattttcgccatgaaataaactattctgttagtttagtatttttggctgtctgagatttcgttatttaaatcaagaccaagctttcaaataaaataaaaaattaattgctactgctggtactagtgaagaaattgatcatttttcttcactttccatcgctcaaatttgttttcactttatttttaactagtattaaactcactttgctcgttgnaaaaaaaaaaaaaaaaaaaaaaaaaaaaaaaaaaaataaataat

SEQ ID NO: 51990 - DNA, 269 bp, Glycine max
  Clone ID: LIB3167-021-P1-K1-A12
gcgttcgccacgcgttcgggcggacctgcgcgttcgctcctccacgctgaaaggcgtcacggtgccggaagaccgcgcgccttcgatgatcgacgaatatccgattctcgctgtcgccgccgccttcgcggaaggggcgaccgtgatgaacggtctggaagaactccgcgtcaaggaaagcgaccgcctctcggccgtcgccaatggcctcaagctcaatggcgtggattgcgatgagggcgagacgtcgcttgtcgtgcgtggccgcc

SEQ ID NO: 51991 - DNA, 402 bp, Glycine max
  Clone ID: LIB3167-021-P1-K1-A2
atcctgaacaaggtcttccataatattacagacactcatgtagcacatcacttgttctccacaatgccacattatcatgcaatggaggctacaaaggcaataaaacccattttgggagagtattatcggtttgatgagactccatttgtcaaggcaatgtggagagaggcaagagagtgtatttatgtggagccagatcaaagtaccgagagcaaaggtgtattttggtacaacaataagttgtgatgattaatgtagccgaggcttctttgaactttcccttgtgactgtttagtatcatggttgcttattgggaataattttgttgaaccctgatgttggtagtaagtatctagacagttgcatagcggttttgtttacagaataagatatagcctctct

SEQ ID NO: 51992 - DNA, 403 bp, Glycine max
  Clone ID: LIB3167-021-P1-K1-A3
tgaaacttggcaatggctgtggttgcagtgcagcaattcctatgcttcacagaattaaattggagaaatataacaaggccatgcattccccctcacagttcaattctcctacgttcacgcaaaaagattcaatattctctgatttcatgctcttcatcacagaccccagaagctgatactcaaactgctgaatcttgcgtcaatttgggccttgagctcttctccaagggacgggttaaagatgctttggcccagtttgaagcagcactttccttgaaccctaatccggtggaggcccaagctgcgtactacaacaaagcttgctgccatgcatacaggggagaaggaaagaaagcagccgattgtctccgcactgctttgagggaatacgatctaaaatttg

SEQ ID NO: 51993 - DNA, 400 bp, Glycine max
  Clone ID: LIB3167-021-P1-K1-A4
cccacgcgtccggtctaaggtttcatatatgaatatttcatatccttacacacttccacatgatatataacattctttttgttatgtaatgtaatgataaatgttatgacctctcacctcacttcttctagaatcctatacttacattcacaggctgaagtactttcagctgttttgttcattttggtgtaagatttatctactttttggtttatgtgaggtacttgtgtggtgtaagtagaacttctgctgttcaaggtgccggcaaaaggtgatgaagttgattgcaactgttgaaggaatcgcttccattgtcctagacccagacaaaaacacagtgacagtgattggtgaggctgatccattaaggacagtaaagcctgttagaaagttcagaaaa

SEQ ID NO: 51994 - DNA, 343 bp, Glycine max
  Clone ID: LIB3167-021-P1-K1-A5
cttatttcgtagactgatggttaatcctgcttactatggattggaggatgctgaatctgaatttctaaatacatatttgtccagcctagtacagaccacatttgaggatttggaagacagtggatgcataaagatggatgaagacaaggtggagcccatgatgttgggtacaattgcatctcagtattacctcagctacatgactgtatcaatgtttggttcaaacataggtccagatacatcacttgaagtctttttgcatattttatctgctgcttctgaatttgatgaactacctgggccgtataatgaggaaaaattcaatgaagcactgtctgagaaa

SEQ ID NO: 51995 - DNA, 315 bp, Glycine max
  Clone ID: LIB3167-021-P1-K1-A6
aaagttaaaaggtgtcgtgttcacgacttaatacacgacatgatccttagaaaagtcaaggatacaggattttgtcagtatattgacgagcctgatcaatctgtatcaagtaagattgttcgacgcctgacaattgcaacccatgattttagtggaagtataggaagctcacccattcggtcaattattattagcacaggagaagatgaagaagtatctgaacacttagtaaacaaaatccctaccaattacatgctattgaaggtacttgattttgaaggttctgatttactttatgttcctgaaaatttgggg

SEQ ID NO: 51996 - DNA, 395 bp, Glycine max
  Clone ID: LIB3167-021-P1-K1-A7
gatgtggacaagctagcatttactggctcaacagataccggaaaagttgtactcgaactggctgcaagatgcaatcttaagccagtgacattggagcttggagggaaatcgcctttcataatatgtgaggatgctgatgttgacaaggctgttgaacttgcacactttgctgtgttatttaatcaggggcaatgttgctgtgccggctcacgtacctttgtacatgagcgtgtctatgatgagttcttggagaaatcaaagaaacgggctttgagacgacgggctggcgatccattcaagaaaggagcagaacaaggtcctcagattgacgtggaacaatttgagaaagtgcttaggtacataagagcttggaattgaaagccatgccacccttg

SEQ ID NO: 51997 - DNA, 381 bp, Glycine max
  Clone ID: LIB3167-021-P1-K1-A8
agtaagaagaaatggaggaagcatatggagttgtgaagcacgttttccttgcagaggtgaaggacgacgtcactccagagcggattgaggagctcatcaaggactatgccaatcttgtcaatctcatcccacccatgaagtcattccattggggcaaggatgtaagtgctgaaaacatgcatcaaggcttcactcatgtgtttgaatcaacctttgagagtacagaaggcattgcagagtatacagctcatcctgcccatgttgaatatgcaactatgttcctttcctacctggacaaagtcattgtgattgactataagcctaccattgttaagctttgatgggagaagtatgcctcgtcactgcttgtgttctataaaa

SEQ ID NO: 51998 - DNA, 397 bp, Glycine max
  Clone ID: LIB3167-021-P1-K1-A9
caaagagaagcattagcactaggagcagcaacaactagtctcagctgaaatggcctcttcagtgatggcatctgtggccctcaaacctgcccctttcactgttgagaagtcctcagtgagaggccttccctctctctcaaggaactcttcttcattcagagttgtggccagtggcaagaagatcaagactgacaaaccttatggaattaatggtggcatggctttgagggatggaactgatgcatctggcaggaaaggaaagggaaagggtgtttaccagtttgtagacaaatacggtgctaatgtcgatggttacagtcctatctacgacaccaaggactggtctccaaccggtgatgtctacgctggcggtacgactggcttggctatctgggct

SEQ ID NO: 51999 - DNA, 390 bp, Glycine max
  Clone ID: LIB3167-021-P1-K1-B10
cccacgcgtccggaaagtttcttctgttgattgtgacaagatggtcatggttgcttgtggttggcggcatacaatttctgtttcatctttgggtggcttatacacatatgggtggagcaaatatggccagttaggacatggaaattttgaggattctcttgtgcctcaaaagcttcaagccttgagtgataagttaatcagtcaggtatcgggtggttggaggcatagtatggcactgacgtctactggactactatatggatggggttggaataagtttggacaggttggagttggtgacaatgttgatcgttgctctcctgtgcaagtgaagttcccccatgatcagaaagtagttcaaatctcatgtgggtggagacacacaattgc

SEQ ID NO: 52000 - DNA, 280 bp, Glycine max
  Clone ID: LIB3167-021-P1-K1-B11
cggacgcttgggcggacgcgcgggggaaaagtgatattttccctaccccatacgtgtggggggcgctttaattattctattccaagagctccactccacacaacataattgagcctcttatatcgtacgcactataaatacataaagtactatatatcccactgcaaacaccttcgagagataatatgagacacattcatggttgtgcatccatcaacacgggcacgacactgtgaaggataactagaaccatgactgcagggggatagaactttactac

SEQ ID NO: 52001 - DNA, 352 bp, Glycine max
  Clone ID: LIB3167-021-P1-K1-B12
aaaaaaaaaaaaaaaaaaaaaaaaaaaatttaaaaaaaaaaaaaaaaaaaaaaaaaaaaggaaaaaaaaaaaaaaaaaaaaaaaaaaaaaaaaaaaaaaaaaaaaaaaaaaaaaaaaaaaaaaaaaaaaaaaaataaaaaaaaaaaaaaaaaaaaaaaaaaaaaaaaaaaaaaaaaaaaaaatggggggggcttttaaaaatataaattttatccttcccgtgttttgaaagtatatatttttttttgtgtcaccataatttaaatttcttgggccctgtttttaaaacttatttatttggaaaaatcttggtttaaccaaataatataacttttgtataaaaattcctttt

SEQ ID NO: 52002 - DNA, 405 bp, Glycine max
  unsure at all n locations
  Clone ID: LIB3167-021-P1-K1-B2
ntccgcccacgcgtccgctctcttcttgcttctctctcttcttgctcctctctccttttcaattactctctctaccaaggagtgatggctgtgcaactgtgggaaaccctgaaggaggccatcgtggcctacaccggcttctctccttccaccttcttcacggtgctggcgcttctttttgccgcttactacgtcgtcacgggtctttttggttcctccgacgaccaccaccaccgtcaccgtcacgcccaggaggaggagatgccgcctctgcgccccccggttcagctcggcgagatcacggcggaggagctcaaggcctacgacggcaccgatcccgagaagcccttgctcatggccatcaaggcccagatctatgatgtctcccagagcaggatgttttat

SEQ ID NO: 52003 - DNA, 402 bp, Glycine max
  Clone ID: LIB3167-021-P1-K1-B3
ctagaactagtgtgagctataagctagtttatcgtgaggagaatatgaagttgtttgttttctttgttgctgcagtagttttggtagcatggccatgccatggcgcaggctaccaaaggttccctctccgaatgaaaactggctatggtgagcgttcttcggaggtaaaatgcgcaagttttaggcttgctgtggaagcacacaacatccgagcctttaaaaccattcctgaagagtgcgttgaaccaacaaaggactacattaatggcgaacaatttagatcagactctaaaacagttaaccaacaagctttcttttatgctagtgaacgcgaagtccatcacaacgacatatttatattcggcatagataacaccgtactctctaatatcccatactatg

SEQ ID NO: 52004 - DNA, 402 bp, Glycine max
  Clone ID: LIB3167-021-P1-K1-B4
ctttcacttcacaaaaatgaaaaacatgaaattgtgttcggtgatgctatgcttatcactagcgttccttcttggggccacagcagaacaatgtggcacacaagctggtggagcgttatgcccaaatagattatgttgcagcaaatttgggtggtgtggtgacacagattcctactgtggagaaggttgccagagccaatgcaaatctgcaacaccctcaacaccaactccaacaacacctagtagtggtggagatattagcagactcattagctcttctctctttgatcaaatgcttaaataccgaaacgatggccgctgttctggccatggattctacagatatgatgctttcattgccgctgctggctctttcaatggctttggcacaaccggtgatga

SEQ ID NO: 52005 - DNA, 400 bp, Glycine max
  Clone ID: LIB3167-021-P1-K1-B7
gaacaagttggttatggtgcaacaaacaacctgattgctgctgtggatgccaacataagtgaattgttgccagaatccacttctgcagagtctgaacaagttggttatagtgaaacaaacaacatgactagtggtgttgatgctgacttaagtgaattgacgccagtatcctcttctttagagtctgaactagtagctaatgatgaagaaacagctcacctcattgtggatgacttcatcaatgcaagtaaaatgggaaagtcagaattgtcacttgacgaggttccatcctcaaatttggaaaacaacatagatgttgacaacaccgaaagaagtgattatgaaagcacatcacagcttactgtgccacagatactttcagctgaggtggctagtcatg

SEQ ID NO: 52006 - DNA, 397 bp, Glycine max
  Clone ID: LIB3167-021-P1-K1-B9
gaagaagtgaagagaagagaagagaagggatttggatctgaaaagagaagatggggggaggaatggaagcaaacaagaacaagttcatagaggattggggcactgccagagagaatctggagttcaatttccgttggactcgccgcaaccttgctcttgttggcatcttcggcatcgctattcccgtcctcgtctacaagggcatcgtccgtgaattccatatgcaagatgaagataatggtcggccgtacaggaagttcatgtgagagagtatggagagtcttttgtaataattcgtcaatttagaccttgatattatgaggctacaaaccatgttttttttttccttaattcgcaaaggcttgcttgcttttaagtactctagacctatcaaacc

SEQ ID NO: 52007 - DNA, 401 bp, Glycine max
  Clone ID: LIB3167-021-P1-K1-C10
cgcaggagagacagacagagaagagaatggacgctattgattctgtgttcgatccgctcagggaattcgccaaggacagcgtcaggctcgtcaagcgatgccacaagcccgatcgcaaagaattctccaaggttgctgtgcgtaccgcgatcggtttcgttgtgatgggattcgtgggtcttttcgttaagctcatcttcattccaattaacaacatcatcgtcggatctggttaggatgaggggaatcgcaatcgcctcaggaattcaagttatcaaacaaaatgagaggcagaaagagttccaacttcaaatagatagctcaatgaaattaattgtagttctgctgtatttcatttttggtttacctttgtatcttcggaagcattacaattttatttg

SEQ ID NO: 52008 - DNA, 206 bp, Glycine max
  Clone ID: LIB3167-021-P1-K1-C11
aaacacccttagaataaagtggtcatttcttgcccttgagcaagttcaagtgttttggacttgtgatgggtgtgttaaggtcatggttgccttttatatatatatatatataaatgtttggtaattggtcgcttctgtataaagttcggctagttaatctgaattatgaatctctgcttataatattaaactagtactattgctgg

SEQ ID NO: 52009 - DNA, 400 bp, Glycine max
  Clone ID: LIB3167-021-P1-K1-C12
cattccaaaccgacgtcaatggcagcctcatcctccttctccaccctcttctccttcctcctccctccaaagccacaccctcctcccatcatcactcgcttcccactccagaagctacgtgccaagcatcaggaccaggaccaccactcgtcggcggagctgtccgccgtggcgaacccgtcccacgcgcatgcgaacacgctcttcttccggtcggcgtacaacgtgcaggtggtgggggacgagaacgagccggaagagaggctcctcaaccggttccggagagaggtcatgagagccggagtcattcacgagtgcaagcggagacggttcttcgagaacaagcaggaggaaaagaagcgcaagaaccgcgaagctgccaagcgttagagcagaagca

SEQ ID NO: 52010 - DNA, 405 bp, Glycine max
  Clone ID: LIB3167-021-P1-K1-C2
cccacgcgtccgcccacgcgtccgcttgtctgcatttacaaatgccgtgattgctattggtgtctttagtaatatggtgctatccaattggcaaacctcatgagtagtagaagcagcagtcaagagggaaagaaccatggcatatgccttctctcatcagttttatcagcaggaagcgtccaaatttaaaagacagagctgtcatgttggttgcagaaagaggaagaagaagaagctaatatgaagtatgagagtagaacccagcaaagaatgtgattgatattcatcctttaaactgaagaacaaaaatagagaggatttcatatggatacaaccaatgcaattcactcaatattagatgtatacatgaattatatttgttaggttatcccatgtattgatgtc

SEQ ID NO: 52011 - DNA, 396 bp, Glycine max
  Clone ID: LIB3167-021-P1-K1-C3
cccacgcgtccgaagaacttcgctctccagcaagttttccctcaggatgagaaggaggctgcaatcttgctcatggctttatcttatggccttcttcatggctttcccacggatcgttatatcacttagatttatgagatattggttgtggaaccataattattgtatgagaccaatgcttagtgttatgctagatttagtgaagttaattaattagtatggaaaactgataatatagggacaataaagttatgaggagggtatcgttttatcaagttaattgtatgttgcatctgaaaaagaagacaaacacaaaatactagtgtcttattggtcatgatcatgagtatcccatattaatctcaaataaatattaataaaatttcaagaagattt

SEQ ID NO: 52012 - DNA, 395 bp, Glycine max
  Clone ID: LIB3167-021-P1-K1-C4
cggacgcgtgggatcatgacatgaaggagaggctttgcttggaggtggagaggcttgggctgagtgctgttattatggggagtagaggctttggcgccgtgaggcgtggcagcgatgggaagcttgggagtgttagtgattactgcgttcatcactgtgtttgtcctgttgtggtggtgcgttatcccgatgataaggatgcggtcgcggcggccaccacggccgagcccgtggtggcggtcaaggacggagacgagggcgaggccgtcgtccagccggtgccgcataagaaagaggattagttggagccaactcatcacttcaaccctatctctgaagagtgtttctgatccgaagagataggtggaaatatggttgtagagtgctctctttct

SEQ ID NO: 52013 - DNA, 405 bp, Glycine max
  Clone ID: LIB3167-021-P1-K1-C5
cccacgcgtccgaattatcaaaggtgaaacgaagaagccctaactacgcacgcattcgtgagaaaactcaatattcgtcgctcatggcactctcttctcgtctcttttccaaatccaaattgatctatggcagtcaaatacttctacaaaaggagcatgctattccagttcgtcactttgctaaagagtctgcccctcctgcccttaagggagacgagatgctgaagaacatttttgtggaggtgaagaacaaatttgagaccgccataggaatattaaagaaggagaaaatcaccattgacccagaagatccagctgctgtttctcattatgcaaaggtcatgaaaacaattagagagaaggcaagcttattgtcggagtcccaagacatactatccaccattg

SEQ ID NO: 52014 - DNA, 404 bp, Glycine max
  Clone ID: LIB3167-021-P1-K1-C6
cttcaggtgagtggctccacacgcttgaatgtggggagtggaagcagggtggcctcagtcacacgtgcagggttcacagttagagcacaacaacaacaagtgagtggtgaggtacaaagcagccgtagggcagtgctttcacttgttgctgctggtttggccactggctcttttgttcaagctgtgcttgctgatgccaaatctatcaaagttggaccacctcccccaccttctggtggattgcctggaacgttgaactcagatgaagcaagagaccttcagctgccattgaaagataggttcttccttcaaccattgtctcctactgaggctgcacaaagggcaaaggaatcagccaaggagattgttggtgttaagaagttgattgaaaagaaggcttggcc

SEQ ID NO: 52015 - DNA, 396 bp, Glycine max
  Clone ID: LIB3167-021-P1-K1-C7
ctcacatctcacatcctcttagtctgaaaatggatcttgccccagaagagcttcaattccttaccatccccgacatcctacgagaatcaatctcaatcccaaagcgttctccgaaaacattttacctcattaccctcagcctcatcttccccctctccttcgcgattctagctcattccctcttcacgcacccccttatttcccagctgcagtcccctttcaacgacccttcccaaacctcccacgagtggaccctccttcttctaatccagttcctctacctcctcttcctcttcgccttctccctcctctccaccgccgccgccgtcttcaccgtcgcctccctctacacctccaaggccgtctccttcttcttcaccctctccgccatccccc

SEQ ID NO: 52016 - DNA, 369 bp, Glycine max
  Clone ID: LIB3167-021-P1-K1-C8
ctcactctttctctcactctttctatctgtttagtttaagcatatcaaaatgtgaaccaatgaaagctgaacatgaaatgcttatagcatgtgcaaatgtaaggttccgaactgaagcactggtgaagctggagcatgcaaggctctttgaaatatcggttgaaaagggactagtgggtttgtctgatgggtgatccatgacttgtggatataggacacctaatcagagatacatgctaattacctttactttcaaatcactggtagtttctcagaaaagcacaggagatgatatatgctttgcgttcactctgacatataaacgaggcataatatgatggtgcaaatattaattttacactggcactt

SEQ ID NO: 52017 - DNA, 397 bp, Glycine max
  Clone ID: LIB3167-021-P1-K1-C9
tgagaagtggaggcactgttgatatggaggatgaacttgtgggtaaggatcgctatataggatccattgagagcctcataaggaacaatattcaacaatataagatagatatggctgatgaggttattaatgctggacgttttgatcaaaggacaacacatgaagagagacgtttgaccttagagacattgttacatgatgaagaaaggtatcaagaaaatgtccatgatgttccttctcttcaggaggtaaatcgcatgattgctaggagtgaagaggaagttgaattgttcgatcaaatggatgaagaactggattggcctgaggacgtgatgcaacatgatgaggtgcctgagtggctccgagccaatacaagagaagtgaatgctgctattgc

SEQ ID NO: 52018 - DNA, 401 bp, Glycine max
  Clone ID: LIB3167-021-P1-K1-D1
ccatttctagacacattaccctcacaaagtaagcaatggcataccaaaactacaacaactatgggtggcgatgcccctctgacgagtaccaagtgtacgaccccccagtagaggcaacatatcctaggcaaaatcatcacaagaagggtcatgtggcattcagaaccaactatgaggattctatagctgaagtagaatccaacgttgaggctcgagaacataacagcaggttatggaatcacagtgcttacaaaagcgtggaccaagaggctgaggcgtttattcagtatgagcataagaggatggaattagccaggcttatgtcaacaagggctgtctgagcctctcttgaaatatatatatatatattatcataggggcttcatgtgcattgttacata

SEQ ID NO: 52019 - DNA, 399 bp, Glycine max
  Clone ID: LIB3167-021-P1-K1-D10
gtgatttcagtgagtgatcggtgttcacttgatctcatcataatcgtcagcgtcaattgaagaagatgccgatcagaaacatcgccgtcggaaggcctgaagaggcgactcaccccgacacgttgaaggcggctttggctgagttcatctcaaccttcatcttcgtgttcgccggctcaggctccggcatcgcctacaacaagctcaccgacaacggcgctgccacccctgccggcctcatctccgcctccatcgcccatgcattcgccctcttcgtcgccgtctccgtcggcgccaacatctccggcggccacgtcaaccccgccgtcaccttcggcgccttcgtcggcggcaacatcaccttcctccgcggcatcgtctacgtcatcgcccagctcc

SEQ ID NO: 52020 - DNA, 399 bp, Glycine max
  Clone ID: LIB3167-021-P1-K1-D11
agaagaagaagaagaagaagcaagagagagagaggagagaatatggcgaccacaggcgctttgtgtggcactatgttgaacacctccttcctgaagaggcaggcatcagtgaacatgacaagcttcaaggctaacgctgctgtctttggtgtaaaaggaggacgaggaggtcgtgtgagggccatggcaacttacaaggtgaagctgataactccagagggagagcaagaatttgaatgcccagatgatatatacattcttgatcaggcagaggaaaatggcattgatcttccctactcatgcagggctggttcttgctctgcatgtgctgccaaagttgtgagtggcaaactggaccagtcagatggtagcttccttgatgacgaccaaattgatgca

SEQ ID NO: 52021 - DNA, 402 bp, Glycine max
  Clone ID: LIB3167-021-P1-K1-D12
accacgcgttcgcccacgcgtccgtattcacaaccgcaacagttctcatctatgtcacaaaacgacaacaatatcaaattgctcccttgtgtgactgttcctcttactgtgcaccctccacatagctgacaccctcttaacccccaccaacttgatgaagtgctgctgcagcaccacccagtacccagccctgtgcatccagtgactctgcgtctacgcctgcaccatccagcaagacccccacgagctcgttcagacaggcctgttcctgtacctcaaccacaccgaggccaccaaaaccttcgtcgcaaaacgcaacaaattcagagggctcaaaccgagagaatacgctgccttgaaggactgcgctgaacaaatcagtgacagcgtcgaccggctcag

SEQ ID NO: 52022 - DNA, 402 bp, Glycine max
  Clone ID: LIB3167-021-P1-K1-D2
cccacgcgtgggaagaacttcaagacattatagctatccttggcttggacgaattatgcgaagaagatcgcttaaccgtagcaagagcacgaaaaattgagcgtttcttatcacaaccttttttcgtagcagaagtttttaccggttcgccggggaaatatgttagtctagcagaaacaattagagggtttaaattgattctttctggagaattagatggtcttcctgaacaagccttttatttggtaggtaatatcgatgaagctactgcgaaagctacgaacttagaaatggagagcaatttgaagaaatgactttaaatctttgtgtactgacccccaatcgaattgtttgggattcggaagtgaaggaaatcattttatctactaatagcggacaaat

SEQ ID NO: 52023 - DNA, 398 bp, Glycine max
  Clone ID: LIB3167-021-P1-K1-D5
cccacgcgtccgcaatgctggaaggttcagtgaagatgaggctagatatttctttcagcagctgatttctggtgtacattactgtcatgccatgcaaatatgtcacagagatttgaagctagaaaatacccttttagatggaagtcctgcaccccgtctgaaaatttgtgactttggttattccaagtcatcattgcttcattctcgaccaaaatcaactgttggaactccagcttatatagcaccagaggttctttccaggagggagtatgatggcaagttggctgatgtatggtcatgtggagtgactctttatgtcatgctggttggagcttacccctttgaggatcaggatgaccctaggaattttaggaaaacaattcagcgtataatggctg

SEQ ID NO: 52024 - DNA, 403 bp, Glycine max
  Clone ID: LIB3167-021-P1-K1-D6
cgttggggctgccatgcagtttcttcaatcaaaggctctctgcatcatgcccatctcactggcatcggcaatataccagtcacaaccaccggacacttctagcatagtcaagcatgaaactagtcctccttcctaattctcatgttgcacaatctattattattggtcccatctcaggctcacctaatacttgctgggacccacacctaatgcgttatttgtctgttccaaatccccccataaaataagtcattggcaagcatcaagttgcaatcaaagtcagatgccataattcttccttttttttgcctttctttcagcttttgtcaatacagggttcgatgtcaatgccttggaaaatacaagcaaacccctataacttatctaccgaatttcaagtaga

SEQ ID NO: 52025 - DNA, 253 bp, Glycine max
  Clone ID: LIB3167-021-P1-K1-D7
ggtgaacttgttagaccacctatagctgaccggagagagcacttcatatacaattcgttggtgggtgctggaacatatatgtttcgtattgatgatgaacgagtcattgatgctactagagcaggaagcattgctcatttgattaatcattcttgtgcaccaaattgctattccagagttataagtgttaatggcgatgaacatattataatatttgcgaagagggacattaaacagtgggaagagcttacac

SEQ ID NO: 52026 - DNA, 398 bp, Glycine max
  Clone ID: LIB3167-021-P1-K1-D8
agagctatctggggaccccttaacacaaccattatcagtgctggcgaagatgctgttattcgtatttgggattccgagaccggaaaactgcttcaagagtccgacaaggaatctggccataaaaagactgtaacttcacttgctaagtctgccgatgattcacatttccttactggttcccttgataagtctgctaggctttgggatactaggtcattgactcttatcaagacctatgtcacggaacgccctgtcaatgcagttacgatgtcacctcttcttgatcatgtggttattggaggtggtcaggatgcgtcagctgttacaactactgatcatcgtgctggcaaatttgaagccaaattctttgacaagattcttcaagaagaaattggggg

SEQ ID NO: 52027 - DNA, 398 bp, Glycine max
  Clone ID: LIB3167-021-P1-K1-E10
attgtttgttgttgtaactcgttcttcttcttttgttgttctgtgcttgcgtttgtgttttctctcacctgaaaatgccttgctgcggtggtaactgtggttgcggaagctcctgcaagtgcggcaacggctgcggaggctgcatgatgtacccagacttgagctacactgagtcaaccaccaccgagaccttggtcatgggagtggcacctgttaaggctcaatttgagggtgctgaaatgggtgtgcccgctgagaacgatggctgcaaatgtggaccaaactgctcctgcaacccctgcacttgcaagtgaggtgttgggagagcaagcttcaagcagagatagcccttaattaggaataatgataaactattaatgtgtagctaaaaacttatg

SEQ ID NO: 52028 - DNA, 400 bp, Glycine max
  Clone ID: LIB3167-021-P1-K1-E11
aaaaccctaggatccagcgccgctaagaaggccacctcaaggagcagcaaagccggcctccaattccccgtcggtcgtatcgccaggttcctcaaggccggaaagtacgccgagcgcgtcggcgccggagcccccgtctacctcgccgccgttctcgaatatctcgctgctgaggttttggaattggctggaaacgctgcgagagataacaagaagactcgaattgttccacgccacatccaattggcggtgaggaacgacgaagagttgagcaagcttctaggagatgttaccattgctaacggcggtgttatgcctaacattcacaaccttcttcttcccaagaaggctgggggctcatccaagggtgctgctgctgacgatgactcttaaataggga

SEQ ID NO: 52029 - DNA, 355 bp, Glycine max
  unsure at all n locations
  Clone ID: LIB3167-021-P1-K1-E12
gcgagcggcccctntttttttttttttttttttttttttttttttttttattgtttgggtttttttttttttttttttttttttttttttttttattttattttattttttttttttttttttttttttttttttttttttttaaaaaaaaatattgggggggggtttaaaaaataaaaataaacttttgttgtaaatttttatataaaaaaaaaaaaaaggtcccatctataaaaaattggaattttttttaaactaaaaaatatttttttttaaaaaaaaaaaaaaaaaaaaggggggtcctttttataataaaaatatttatttcgtttttttatagaaaatattatttttt

SEQ ID NO: 52030 - DNA, 398 bp, Glycine max
  Clone ID: LIB3167-021-P1-K1-E2
gacagatttcatactcaccgtccgaaacccggtgactgcaagtgttgtagaaaatgaagtggccacaagcacccataaggaaagttcattttttgataaactcaagaagacattctcttgggttggaacaaaagggtcagaggtcacattcagggaggagtatcacctaactccaaaagatggttacctcagaagccaaaccatggtgctgaatggtattccattggagttaacagacgaaggagatcttccaccgttggatccagtgcgcaataacgtgcgatctccaatatacatgactcctttgtccattgcatttgttgtataccccaactttgatgctccagcttgtgctacacacagaaaactttagtctaaggtttctataataaaccaag

SEQ ID NO: 52031 - DNA, 53 bp, Glycine max
  Clone ID: LIB3167-021-P1-K1-E3
tgaatatttcggctgtttggattatataccattttcctctgtttttttggctc

SEQ ID NO: 52032 - DNA, 390 bp, Glycine max
  Clone ID: LIB3167-021-P1-K1-E4
accacgcgtgcgcttgaacaagtgggtcatggtgacatgaaagataagacatggtggcgaaagatgcaaactcgcgaagaggtgattgaagcctcagctaccctcgtatggatcgcttcagacctgcatgcagctgtgcactttggacagtattcatatggaggtttaatcctaaacaggccaaccattagcaggagattcatgcctgagaaaaggactgctgagtatgcagctttggctaagaaccctgagaaggagtccttgatgactattactggcaagaaggagaccctgattgaccttacaattatagaaatcttgtcaaggcgcacatgtgatgagctctaccttggggagagagatagcggtgactattggacttctgatgct

SEQ ID NO: 52033 - DNA, 402 bp, Glycine max
  Clone ID: LIB3167-021-P1-K1-E5
aaaaaatggcactgctttctttaagtgccatgtacatgagcaatttgagatgacgggtttggatcctgagtataataggttgttcaatgagggcatggtgtgcagtgctagggttgtgtccaaggctgtgatcactggctacaaagatgggttcaaccagattaagtccttggttgatgttggaggtggcattggagggtctctttcggagattgttagggcttatcctcatatcaatgccatcaactttgacttgcctcatgtggttgccactgctcctaagttcgatgggatcacccatgttggaggtgacatgttcgtgtccattcctagtgctgatgctatttacatgaagtggattctgcatgactggagcgacgagcactgcatcaagatcttgaa

SEQ ID NO: 52034 - DNA, 383 bp, Glycine max
  Clone ID: LIB3167-021-P1-K1-E6
gaaatgtaaacaggcatagactgttctgagagatggagagagataccatgatgatactcgttgtactcactgccttctgcacatgactactacctgaagccaccgatcaagcagccattaacatgaaaggcctggaccggcaaaactgagggaaatacttactgtgtgtgtcagatgtagaaccataatagggaggaagatgagcagcctcaactgggaaagaaagatgccctctgactgccgcacaatctgcgcgattcgtatgacaaggggcactgagactttatgctagccccataccgtgtgaacgctatgatagagggctctactcgcaacattactgtcggaggtgacgcagttatacagtcttgcgctccgcactg

SEQ ID NO: 52035 - DNA, 396 bp, Glycine max
  Clone ID: LIB3167-021-P1-K1-E7
caaaaccacttccattttatccattccaacttcccaacccaaccaacaacaaccataacacaagacagtgtcagcgcgcacgcatacatggccatcacaggcaacctcaacctcaacctagtactccccgtggcacgccccatggcgtgccccccacgcgccccaacgtccctcctcgctcgtggccgtggcgcgtcgtcgtcaccttcgctcctggtcacgcgcgccatcgacgtgaacgagttcctgggggacttcggggcgcgggaccctttccccgcggagcttgagagttccttcggggagaaagtgctgggatacagcaacaccgagcacaaaatcctcatccccaccatcactgctctcgccctctcgcagcaggagtgtgctcccgtt

SEQ ID NO: 52036 - DNA, 175 bp, Glycine max
  Clone ID: LIB3167-021-P1-K1-E8
cccacgcgtccgggacaacagcaacaatacagttcccggttggtttaaaattcagaaacttcccttggactttattacaacctactacattgtgttctgtccacttgaccaaagccaactcttcaacatgggctttgctcaagtggtcagaacaccatgtatcatgcttgttttt

SEQ ID NO: 52037 - DNA, 395 bp, Glycine max
  Clone ID: LIB3167-021-P1-K1-E9
ttggagtgcaggacaaaaacatggaaagaaattttggcaatggcaacttttatcaacatccacctgatttggatgagactgcttcctctgtttctgaggacggccctggcattgagaattttcaagtttctggtgatgctattcctggagaaaagcttcttggatgtggatatccagtccgtggaacttctctttgtatgtttcagtgggttcggcatcttgaggatggcactagacaatacattgaaggagctacaaatccagagtatgttgttacagctgatgatgttgataaattgatagcagttgaatgtattccaatggatgataaaggccgtcagggggaactggtgaagctttttgctaatgatcagaacaaaataacgtgtgactca

SEQ ID NO: 52038 - DNA, 400 bp, Glycine max
  unsure at all n locations
  Clone ID: LIB3167-021-P1-K1-F1
tccacgcgtncgaaaattggatatgaacctgacacgagcttttgtctccatggaataggggggcatcacaaggaaatttttctattccattacaaggcttaaccggcaacaacctattggattcctgtgaccaaacctggaaaggccattccgattggaaagaatattcctctttgtggggaccggcatgcattcttaaaatatgcatctattgtcacaaagagggatatatttctgagagattcttctggatttcattggttctccaatggccagtgctcgtgtaaagactgctggtgaaacgctggttcatccaactggtcatcatcattcatgccaatgatgtttgctgaataattttttttagttatagttataggatagcaatgttacataagag

SEQ ID NO: 52039 - DNA, 400 bp, Glycine max
  unsure at all n locations
  Clone ID: LIB3167-021-P1-K1-F10
aaacagtgtgatgaaaatgaaggtccttgttttcttcgttgctacaattttggtagcatggcaatgccatgcgtacgatatgttccctctccgaatgaacactggctatggtgcccgtactccggaggtgaaatgcgcaagttggaggcttgctgtggaagcacacaacatctttggctttgagaccattcctgaagagtgcgttgaagcaacaaaggaatacatccatggcgaacaatatagatcagactccaaaacagttaaccaacaagcttacttttatgccagagacctcgaagtccatcccaaggacacatttgtgttcagtatagatgggaccgtactctctaatattccatactacaaaaaacatggatatggngtggagaaatttaactcg

SEQ ID NO: 52040 - DNA, 69 bp, Glycine max
  Clone ID: LIB3167-021-P1-K1-F11
aaaaaaaaacaaaaaaaaaaaaaaaaaaaaaaaaaaaccaaaaaaaaaaaaaaaaaaaaaaaaaaaaaa

SEQ ID NO: 52041 - DNA, 327 bp, Glycine max
  Clone ID: LIB3167-021-P1-K1-F12
tttcggtttcatttcatcaagatgatctgtttatcttttttttttttaattttaatttaaagtctttgtattttgtatgtaaagatgtaaaattatgattattaggtggtgcatgtgttgcgtcatgggccaatgttatcctctgcttttaagttggaagaggcccagctcacgtgtgatgtacggctgtgattgtgtaatttgcaaaatcaaaaataacccccgagtcatatatgcatctttttattttattttaaaaaaaaaaaaaaaataaaaaaaaaaattataaaaaaaaaaaaaaaaataataatatataaaaataatatt

SEQ ID NO: 52042 - DNA, 242 bp, Glycine max
  Clone ID: LIB3167-021-P1-K1-F2
gttgtaagaaaaacaataatgttttactataattcgattgattttgtttaattcacgtgtaatttattgtatttggaagttcaacttgtgctacttggcaaagtatgaatcaatcactgcttggtcatgttgaaaaaaaaaaaaaaaaaaaatataatattaaaaaaatatatttaaaaaataataaaaatttttttttaaaaaaaatcatattttatcataataattaataatatttattc

SEQ ID NO: 52043 - DNA, 398 bp, Glycine max
  Clone ID: LIB3167-021-P1-K1-F4
gttttgccttctttccaattcattatcatggtttttgctggtcctgatatatgacccttcttgcttctttcctgatctataggcaacaaggctcaaggaactagtattgtttctatcatgggagtttgtttgagcacccaaattaaagctgggttaaattcaaagcatgttagtgccgatgcaaaagatcacagcagtccaattagcaataaaattacaaaagatgtcagcacaccaatcagtaaagtctcagaggtatcagtgcctcagactcctcggattgagggtgagatcttgcagtcatccaatctgaagaactttagtttgacagaactcacagctgccacaagaaatttccgtaaagacagtgttttaggaggagaaggtgattttggatc

SEQ ID NO: 52044 - DNA, 397 bp, Glycine max
  Clone ID: LIB3167-021-P1-K1-F5
cggacgcgtccgcccacgcgtccgcggaggcggaggagctaccccggtctattgtgcgccgcgtagtgaaggataagctgtcccgttgctccgaagacggagaaatttccgtcagcaaagacgctcttctcgcattctccgaaagcggtaggatcttcatccactacctttccgcaacggctaatgatatatgtaaggagtctaagaggcagattatcaatgttgaggatgttttcaaagctcttgaggaaactgagttccctgagtttcttcgtcctctgaaagcttcccttgaagagtttaggaagaagaatgctggaaagaaagctgcagtgtcaaagggaaaggatgatgagccgagaaagaaaaggaagttggaaggtgagtcacctgataa

SEQ ID NO: 52045 - DNA, 274 bp, Glycine max
  unsure at all n locations
  Clone ID: LIB3167-021-P1-K1-F6
cccacgcgttcgtccacgcgtccgctaattgttatcagcatgagttacttacattttgtggacaacaccatgagtggttgtgcctatttttgccttgagaatttggaggcatcgtgttgcctttaaactgggagcattgatagttggataattacagggcttccatgatttattaaggaaagttgatgttctaggattttaaattggtgattttttttatctgatcattaccgttataaatctcnntntaaaaaaattaaatttaaaaaattat

SEQ ID NO: 52046 - DNA, 397 bp, Glycine max
  Clone ID: LIB3167-021-P1-K1-F7
cccacgcgtccgaactgcggtagcgtgcggttgttgggggaagaagagagaaagcgatggcgaatcatggtgctaagaaacgcaaggaagagaacgctcgtcacatggctaggctccgccaaatcatcatcgcctgcaacgttatctatgtgttgctaagaatgttggtgttccattcgagcttcacctggaagcactggattgggttgattgtgacttctttggcatatgttattccctatcaacagctcgcgaagatggcgacccctgcttacgctgaagatggtgaacttttagatggtggatttgatatgtctacaggtggagtttgtggatatttacatgatgttatctacataacatgctttgtgcaagtcatgtccatcgtctctggaaa

SEQ ID NO: 52047 - DNA, 374 bp, Glycine max
  unsure at all n locations
  Clone ID: LIB3167-021-P1-K1-F8
tcgtctcggcacatgaagtccggtattgtatgtctatctcgttgtcccggtaggaagaactgtaaccagagagaaggacgttccttgatgcccagtataataatagtcatcaaagggataccccagaagttcagttgcaacttcccaagntattatggtctattaactgagttanttctttcatcnttcttnttcccgagaccattagtagaacgtacatatctttattttcccctgaaaattgaatggcatgtgattctttctatttaactcctgtttgaatgcatccttgtagcaaacctttccttgatgttacatccaaaattgtgagcaaaaccttcttttagcccttgaagaatatacttattattatc

SEQ ID NO: 52048 - DNA, 392 bp, Glycine max
  Clone ID: LIB3167-021-P1-K1-F9
cctggtatgagggcaggtgctgagaggactactggatctgatatgcgacgcaggaatgatgagaactctgtgagagtaactaacctctctgaggacacaagagagcctgatttgctggagctgttccgtcctttcggccctgtcagcagagtctatgttgccattgatcagaagactggcatgagcagagggtttggctttgttaactttgtcaacagggaagatgcacaaagagccatcggcaagctcaatggttatggctatgacaatctcatccttagagttgaatgggcaaccccaagagcaaattaaatgttgagtgttttttgcccctttctttaaaacagtattttgaaggtctatgtatttttgtagtccgagtcttgcactat

SEQ ID NO: 52049 - DNA, 397 bp, Glycine max
  Clone ID: LIB3167-021-P1-K1-G1
tttcacgctgggtgtttttaatactatctcttctcttttctcaagtctcacacgcggagcacaaaaacaacaaaagtaactagtgagtatcatcgtgtctcgattctgaaaccaaaacacattacaatgcaacaacattctcagaccctcttcgccaccttcaccataatcttctttgccttcttcttcccttcaacattctccttcactctcacccaagccaaagaaaggaacaagaacaagaccaacaaaagtacgtgaaagagaaagagatggaggaaattgttccagtggtggatttccagaggctttcataggaagaggagcgcaagaagctgagaaaaacatgtgagaaaccaaggtgtttcagaatcatcaaccactcaatttcactaac

SEQ ID NO: 52050 - DNA, 401 bp, Glycine max
  Clone ID: LIB3167-021-P1-K1-G10
cgcacgcgtccgggtggatcaaacgttccttaccataacacaggaagagccgtgtgagggaaaactaaagatgatcccaacactgagaggccggtcgattttgtttacctatcaagaaatgaagcttttggtcactagaaggcatcacattttctcgcttatggaatcaaatctggatcccaagatgtcttgcctgtcttgactgatgcattctatggaaatactttgagccttgcgtttgattattttgctgacgtgcacactctctatgaagggggagttacactacctacaaactatcttagcaagatcgcccctataccagtgatcaaagaaatttttcgaactgatggcgaacagttcctcaagtgtacacctcctaaagtgctgcaggtggataa

SEQ ID NO: 52051 - DNA, 401 bp, Glycine max
  Clone ID: LIB3167-021-P1-K1-G11
ggagggtcatattgtgaccaattatcacgttatccgtggtgcctctgatctcaaggtcactcttgctgaccagtcaacttacgatgccaacgttgttggttttgaccaagacaaggatgttgcggtgctgcgtgttgacgcacctaaagacaagctcaggcctatacctattggggtctctgctgacctgcttgttggtcagaaggtttatgctattgggaacccgtttggacttgaccacacactcacaactggtgtcattagtggacttcggcgagaaattagttctgctgcaactggtcgtccaattcaagatgttatacagacagatgcagcaattaatcctggcaacagtggagggcctctcttagatagttctggaaacctcattgggataaata

SEQ ID NO: 52052 - DNA, 402 bp, Glycine max
  Clone ID: LIB3167-021-P1-K1-G12
aaattccaactggtttgctttcgaggaggatagagatcgggttgccaatgaacgctcaacaggttcccttgcttctccatcacctaatgctgatgaggtttttgtaaaagccagtggggatgttgttgttgctggtgaagatgaggagttagctgacactgcaacatctccagaagcaggactaaaattagaacatggtgggaccgataaaccagttgagtgggttgagtggagggaatcttcagatgccaatgacccttctgatgttcttcccaatggagaacttgagatagaacctgggaacagtaatcctggtctagccgaatcatcatcttcatcatccagtgttgcattaacaaaggatgagcagatagctactgatgagccatcagcttctctcaa

SEQ ID NO: 52053 - DNA, 245 bp, Glycine max
  Clone ID: LIB3167-021-P1-K1-G2
tttcttacatctgattgtttttaattctatttttttctctatctcaagtctcacagacagggtacattaactacaaatgttactactcagtattatcgtatcttgtaatctgaaaccaaaacacattacaatgcaacaacattcttatacccttttctccaccttcaccataaacttttttgccttcttctttcctacaacattctactttactcttacccaagccaaataaaggaacaagaaca

SEQ ID NO: 52054 - DNA, 404 bp, Glycine max
  Clone ID: LIB3167-021-P1-K1-G3
tgattaaggcaaagggtgtgatgagattagttttgagaagaaaccagcaatcggcgattaggagtgagagagatatggagggaattgaaggaaatagcagcagatacagtctgaaaccctcgcgaatttgcaacgaagatgttctgatctgcgtcgacgtcgatcctcagtgcctcgtcgaaatgaaaggtgccaccggtcccaatggcagacccctcacccgtttggactccatcaaacaagccatcgttctcttcgtcaatgccaaactcaccatcaaccccgaacaccgttttgccttcgccactctctccaacaccctcgtctcttgggtcaggaaagagtttagcagtgaaattgagtcaacacttgcagcaatgcgtgttctttcagcttcttcttct

SEQ ID NO: 52055 - DNA, 402 bp, Glycine max
  Clone ID: LIB3167-021-P1-K1-G4
cgaaagagaagatggccaccgttccagggcagctcgtgtgggagatcgtgaagaaaaacaactcctttttggtcaagcagttcggaagggggacccagagcgtcgaattcagcagagagagcaacaatctctacaacctcaattcgttcaagtactctggtttggcaaacaagaaaactgttacggtacagcctgagggtaaagatcaggctgtgttgttggctacaacaaagacaaagaagcaaaacaagcctgctgcattgcttcacaaatctgtgatgaagaaggagttcaggaggatggcaaaggctgttgaaaatcaggtggcagaaaattactacaggcccgatctcaagaaggccgcccttgcaaggttgagtgctgttcacagaagcctcaaag

SEQ ID NO: 52056 - DNA, 391 bp, Glycine max
  Clone ID: LIB3167-021-P1-K1-G5
gtttttgttgttgcgcccaatcagtgttgcattttttttttgcaaagaggaggggaagtctttatttgtgagacttttcttatgaagatgaaatacactgtgaggatcgcaaattctgccgtaccaagtttaactgtagccccgcttattgtgaaagtagattcaaatgtaaacgttatcttgactgcttgcctcaccgcgtatgttggatgttatcgttctgtcaaaccaacaccacctactgagacaatgtccaatgtacatgcaatgcgtttcccctttgatgggagtgcaatgctattatcacttctctagctcttcaagtctgtatctaaagatttgagcaatgccatgttgactggttacttatttttactacggattgtagctc

SEQ ID NO: 52057 - DNA, 406 bp, Glycine max
  Clone ID: LIB3167-021-P1-K1-G6
actgaacatcacaatcccttcttttccaccatcaccccaccttccttccccaatttccccgccgatctcttgtcgaattcgagttcttcatcgacttcttcggaggaaacaccgacgacggaggccagagggcgcaagaggaagaggaagtggaaggacttctttgagaggctcatgaaggaggtgatagagaagcaggaggagctgcaaaggaggttcttggaggccatagagaagagagaacaagagcgtgtggtgagagaggaagcgtggagaatgcaagagatgcaaaggatcaacagggaaagggagattctagcacaagagaggtccattgccgcagcaaaagatgctgctgttatgacatttttgcaaaagatagccggacatcagcaacaagaaacta

SEQ ID NO: 52058 - DNA, 400 bp, Glycine max
  Clone ID: LIB3167-021-P1-K1-G7
cccacgcgtccgagaaaacagcatctagttctcgtcgtagcagaaaaacttgtcaccatggtttcttccgacaaggatccacgagaggatgtccttcaagcctggtacatggatgatagtgatgaagatcaatgactcccccaccacaaagaacccaaggagtttgtctcgttggaccaacttgctgaacttggagtccttagctggaaactagatgctgataaccatgaaaatgatccagagctgaagaagattcgtgaagagcgtggttacacctacatggatgcttgtgaggtctgcccagaaaagttgccaaattatgaacagaaaatcaaaagcttctttgaagagcatcttcacactgatgaggagatccgcttttgtgctgctggaagtggct

SEQ ID NO: 52059 - DNA, 273 bp, Glycine max
  Clone ID: LIB3167-021-P1-K1-G8
cccacgcgtccggttcctttcgtcttaaatccttggatggttgatgatcatgaagttctctttaaagttaaattattatcattttgtgcaaaaaaaaaaaaaaaaaaaaaaaaaaaaaaaaaaaaaaaaaaaaaaaaaaaataaaaaaaaaaaaaaaaaaaaaaaaaaaaaaaaaaaaaaaaaaaaaaaaaaaatataaaaaaaaaaaaaaaataaaaataaatttaaaaaaaaaataatggggggccccctttaaatgaaaaaaatttattt

SEQ ID NO: 52060 - DNA, 392 bp, Glycine max
  Clone ID: LIB3167-021-P1-K1-G9
aaaattaaaaaagaagggaaagtgtacgagaaaattatctctctctatatatagatagataaatgataaaagcctcgagggtccgtcccatccctgaaaatgctatgaggtgttgggaaatggttgaagtagttgaataggaggatcgctatgactatagctcttggtaaatttaccaaagatgaaaatgatttatttgatattatggatgactggttgcggagggaccgtttcgtttttgtaggttggtccggtctattactcttcccttgcgcctatttcgccttggggggttggttcacaggtacgaccttttgaacttcatggtatactcatggattggcaagttcttatttggaaggctgcaactttttaaccgctgcagtctccac

SEQ ID NO: 52061 - DNA, 401 bp, Glycine max
  Clone ID: LIB3167-021-P1-K1-H1
cccacgcgtccgataaaatggaggttcaatttgccctcccattccactaacacacatcacatctccctctcgcacgcgacgagggagctccgcttcggaatctcactccctctttctgctaattgacaagatggttgctcagaaattcgttgttgatttgaacaagccccttgtgttccaggttgggcatcttggggaagcctatgatgagtgggttcacgatcctatcgtaagcaaggaaggccctcggtttttccaaaatggttttctcgagttgttcacgcgcaccgcgtggtgggtgattccaaccgtttgggtgccggttgcaagttggttcatttccaactccgtaaaatcaggcctcccttctcttgatgtagctctgctcgtctttcttggca

SEQ ID NO: 52062 - DNA, 400 bp, Glycine max
  Clone ID: LIB3167-021-P1-K1-H10
cccacgcgtccgaaatctctctctaacaccttcaaatcttaaattattattcactttctctctctctctctcagcatggcatctcaagcaatcaccttcaagtccttcgccaccgttatcatcgtggcgcttttcttcgccgccgccgccgcctccgctcaggatttgtctccggcgccggcaccgggacccgatgccggagcagccggatccgtttcgagctcggtggccgtgattggagcttcggttgtgctgtcaatgctcgccatcttcaagcactgaatgtcacgatgccgattttttattttgctgtggatttcgggtgagcgttattgattcgttctacacatagacgtttattgttggtgatttatactgtaattcgttacggagtgatgat

SEQ ID NO: 52063 - DNA, 402 bp, Glycine max
  Clone ID: LIB3167-021-P1-K1-H11
tgatgatggctctaccatttcatggataccatgtggaagaaagcttacatgctcctaccctggcatcaaattcttctatggacctgagacttactacggaaatgaggtgtcagttgtagaaatggatggacaatttgacagactagatgaactaatatacgttgagagccacctaagcaacctctctacaaagttctatggagaggttactcaacagatgttgaagcatgctgattttcccggcagcaacaatggaacaggtctcttccaaaccatagctggtttgaagataagagatctatatgagcagctaatagccagcaaggctgagactccagtagctgcaaaagcttaggaattgaacctgccataatatatatacatatatcgatcgagcaacgc

SEQ ID NO: 52064 - DNA, 401 bp, Glycine max
  Clone ID: LIB3167-021-P1-K1-H12
tgcaaattgcagttgaaatttggaacgtgcaagatccggtgctgtagtctctacattctgtgatggcaccaaaaccgataacgagtcccgtccccgattcgtggtaccccacactctccgtcttcactctcgccatcggcctcgtcttaaccgcctctttcttcatttatgaagcaacatcttctaggaaaagtcgttcacttgttcaggagctgacaactggagcagtggcttcagtcttcttgggttttgggtccctgttcctcctacttgcttctggcgtttatgtctaatataaacattgaattggatgaaattttgccaagcagatagctctaaatgaaaaaatgcattggacgttttagtttgatatctgactctaagttatgttcataatctat

SEQ ID NO: 52065 - DNA, 401 bp, Glycine max
  Clone ID: LIB3167-021-P1-K1-H2
ctttggttttggcagtaccaaccacccatcattgggttcagacccaaccactttgtttatgaaagagaacgtaccaaaaacaatggaaaactttgatattcttggtgtgtgccttttgttcctctccttgataaccatgtcctccacgttggacatggttacaacaattcaaccaatcagagatggtaagaatgagaatgaaactctggtttcaacaaatggaacctttgaagcaggattcttcagcccagaaaacttcgacagccgttacctcggaatttggtacacaaatatatttccaagaacagttgtttgggtagccaacaaagaaaaaccacttaaagaccactctggagtcttagaagtagacactgatcaaggcattcttagtatcaaggatg

SEQ ID NO: 52066 - DNA, 404 bp, Glycine max
  Clone ID: LIB3167-021-P1-K1-H3
tccacgcgtccgcccacgcgtccgcccactcgttcggggactcactctggcagcggcactctcggtggctataatctttctgtggtgagttgtcaagatgtacacatcaaggaagaaaatccacaaggataaggatgctgagccaactgaatttgaggaatcagtcggacaggcattgtttgatctggaaaataccaacaatgagctgaaaagtgatctgaaagatttatacataaactcagctgtccaaattgatgtttctgggaaccgcaaggctgtggttatccatgtcccctacagattaaggaaaggattccggaagattcatgtcaggcttgtgagagaacttgagaaaaagtttagtggaaaggatgtaatcctgattgccacccggaggatattga

SEQ ID NO: 52067 - DNA, 404 bp, Glycine max
  Clone ID: LIB3167-021-P1-K1-H4
attttcatctttttttgagtatcaacaaatggcatccactgtgatgaccactctcccccaattcagtggtcttagaccccaattctcagctgcccctgtgaagaacttggttgctgtgcaacccatgagtcgcaaggggaagggtgcattgggagctcgatgtgactacattggttcatccactaatctgattatggtggcttctacaaccctgatgctgtttgctggaaggtttggattggctccatcagcaaacaggaaagccactgcagggctaaagctggaggtgagggactcaggcttgcagactggtgaccctgctggcttcacccttgctgacaccttggcctgtggatctgttggccacatcattggggttggggttgttcttggtctcaagaaca

SEQ ID NO: 52068 - DNA, 405 bp, Glycine max
  Clone ID: LIB3167-021-P1-K1-H5
tccacgcgttcgtccacgcgtccgcgcatgtacaccttaatgtttatatagggtggtttcttcttggtgttattcttgttctggcttgtgctttaatgcattcttcttcttcttcaaacctcttaataactactgtgccttgaatgttgggtttgagtatatctctttctccttcaaaagtagtgccacttacgtagggcatgatgatgaagaagagtggttttgagaagatggtgatgttgcacaagaacaacaagaacaagggatgctttgatgatgagaaaccaaggagtaagaggtttttggtgaacatcaatatcatggggagtgcatggcctattatgtttgtggtgaatgagaaagagcttgtttctggggtcattgatactgctctcaaatcatatt

SEQ ID NO: 52069 - DNA, 407 bp, Glycine max
  Clone ID: LIB3167-021-P1-K1-H6
cccaacccaatcttcaccttcgcccacaacaaatcccattcctgcatctcctccttcagcatcgctgcaaactttactttccatttttgtccttcctccccgagaaaaaaatggcgaacgcagcatctggtatggccgtccatgatgactgcaagctaaagtttttggagctcaaggcgaagaggacgtaccggcttatcgtttttaagattgaggagaagcagaagcaagttattgtggagaagctgggtgagcctgcaaatggttatgatgatttcgctgccagtcttcctgccgacgagtgtcgatatgctgtttatgattttgattttgtcactgaagagaattgccaaaagagcagaattttcttcattgcttggtcccctgatacatctagggttaggagc

SEQ ID NO: 52070 - DNA, 392 bp, Glycine max
  Clone ID: LIB3167-021-P1-K1-H7
agcaaaagcaagaagaactagtctaagcttaaatggcctcttcagtgatggcatctgtggccctcaaacctgcccctttcactgttgagaagtcctcagttagaggccttccctccctctcaaggaactcctcttcattcagagttgtggccagtggtggcaagaagatcaagactgacaagccatggaattaatggtggcatggctttgagggaaggagttgatgcatctggcaggaaaggaaagggaaagggcgtttaccagtttgtagacaaatacggtgctaatgtcgatggttacagtcctatctacgacaccaaggactggtctccaaccggtgatgtctacgctggcggtacgactggcttggctatctgggctgtgactctact

SEQ ID NO: 52071 - DNA, 268 bp, Glycine max
  Clone ID: LIB3167-021-P1-K1-H8
gaaagattgaagtggcactagattctgacaaatatgttttagtggggtttcatgaatgtcctgttaaatttagattcatcatcagttaaaaccctatcatgtcatattttatttttttagggtccttttactagacattgtggatgaagagtatcttgtatatttttcttctggctttacatgtacctctcagaaatcctatatgcttatggatgacttgttattgtgttgtatttacatcatgaatacatactctgcatttgaatgc

SEQ ID NO: 52072 - DNA, 126 bp, Glycine max
  Clone ID: LIB3167-021-P1-K1-H9
gaaactaatggatgagaactaatgcttatatacctgactacattgacaaatatcgagggaaactattaataaccacaattaaatatgagcaccactacaccatatgacacaaagaacaataaatcc

SEQ ID NO: 52073 - DNA, 349 bp, Glycine max
  Clone ID: LIB3167-022-P1-K1-A1
aagacgcgtacgactgatgaggctagttatttttcttccttaacgatctctttcggagctggtgcgactggcaacctgtctcacccgaaaatggctggctgaggcggtgaccgtaggtgcagaagcgcctgccagagcatgaacacgcatgaaggggctgcccgacgtacctagactcgagctacaccggctcaaccaccacggggacccagcacatgggagggggaccagttaaagtttaatctacgagtgctgccatgggtgttcccaatgggaacgaggggtgcaaatgttgagctagctggaactgcaacccctgctctagcaagagaggtggcgcagagctaaa

SEQ ID NO: 52074 - DNA, 374 bp, Glycine max
  Clone ID: LIB3167-022-P1-K1-A10
cccacgcgtccgctttattgcatgggaagaacccatctcctatgtgggacagattagttttcaacaagataaaagagaagcttggaggacgagttcggtttatggcatcaggtgcctcacctttatcacctgatatcatggaatttttaaagatttgctttggttgtcgggtgactgaaggatatggaatgacagagagtacttgtattataagtttcattgatgagggtgacaaacttggtggtcatgttggctctcctaatctagcctgtgagataaaacttgtggatgttccagaaatgaactatacatctgatgatcagcccaatccccgtggtgaaatttgtgtcaggggtcccaattgttttcggggc

SEQ ID NO: 52075 - DNA, 381 bp, Glycine max
  unsure at all n locations
  Clone ID: LIB3167-022-P1-K1-A11
cccacgcgtccgtcttcttcgtctttcctttgtctctcttctttcccctctctttcgagggtttttctttttcttttttccctttttttatttttcctttattttgtttttttctttctcttgtttttcagttttgcttccatttcctttgaatccccatttattcttcttcttctgcaaccctaaccctagaattgaagatgcagcctcagaggttaaggcagcaagccatgatgcaaccatctctctaccaccaccctgctctacttactcctcctcagatagagcctatcttgagtgganatctgccacctggcttttgattcgagttcatgccgcagtgtttatgtaggcaacattcatccccaggttacagattcc

SEQ ID NO: 52076 - DNA, 338 bp, Glycine max
  Clone ID: LIB3167-022-P1-K1-A12
ctcctccacccctttctttctctctttttctctctctctctctctcgattatttccctttgatgagtgttgaacggccaagatggtaaacgaagacgagtgggtgcgagcggcgatggcggacgacaccgtcgtggtggagcttctgctacgcctcaagcaaggtaccgtttcacacaaatctcaccaccagcttatacctttctcctggggtgtcaaacagccgcgctcaagatcaaggcttagcgccgccgtctctcgctgcgacgccgccgttttaaccagatgcagccccaccacgcccctctcttggagcgctggcaccgacagttacgaaga

SEQ ID NO: 52077 - DNA, 186 bp, Glycine max
  unsure at all n locations
  Clone ID: LIB3167-022-P1-K1-A2
ggcataacctaaacctatctttcttcttnctcnttgtgtgcgcttcaacggcaaccagaagcagccatggccactgcaaggactgtgaaggatgtttcacctcatgagttcgttaaggcgtactcctttcacctcaagcgatccggccagatggagctgccagagtgtgactgatattgagaaaac

SEQ ID NO: 52078 - DNA, 337 bp, Glycine max
  Clone ID: LIB3167-022-P1-K1-A3
cacggccttcagtgtttgggttggggcataggttgccactttctatgatacaacaaccacaatcaacttcttcaaatccgatggtcaatggccccagtaatttgcagccttctcccaatcattcgatgtcgaggccggtgtcaaggactaactctgatttaggttaattaggaactcaatggtagttttgaaatatctacattacaattttagttggtcattgttttcagcagtcaagagtagtgtcaagaaatttgtttgtttaggttttagggcctgtgattggtttcagtagactatgaaaatgttgcttaaaaggaaataagtagcatttgat

SEQ ID NO: 52079 - DNA, 309 bp, Glycine max
  unsure at all n locations
  Clone ID: LIB3167-022-P1-K1-A4
cccacgcgtccgcccacgcgtccgcaatatattccaagccctatacaaccaaaccctaacacacacccatttgattcagtttccatggctagcctcaaggttgcatttttggctgcagtgctctgcatggttgtggtgagtgcacccatggcacatgcagctatcacgtgcgggcaggtgacgagtagcctggccaattgcatcggttacctccagaagggaggaacgccgtcgtcgggatgctgcaacggagtgaagagccttaatgccgncgccaagaccaccgtcgaccgccagacggcgtgcaac

SEQ ID NO: 52080 - DNA, 303 bp, Glycine max
  Clone ID: LIB3167-022-P1-K1-A6
gaacctggtttcgttccgttctccgtttcaggtggatctcatgagctgtggttaacaaagcgagttggacctaagctcactgttcaaaggagatcaaaccttgtgatcaagaggaaccacacttcttcaattagtgcagaataccgtgataatagaggaggtggaggtggggattttgttgctggctttcttctgggtggtgcagtttttggaactctagcttatatctttgctccccagatcagaagatctctgctaaacgaagatgagtatgggtttcgcaaggccaaaagaccaatatat

SEQ ID NO: 52081 - DNA, 383 bp, Glycine max
  Clone ID: LIB3167-022-P1-K1-A7
cccacgcgtccgcccacgcgttcgttagttctagatcgcgggcggccgccctttttttttttaccttgttgtgggatttgaataatatggacgaggtatcagattctgtaaaaaaaagtcttttaacttttcgttttaggtctagtggcagtgagatttggataatatgcatatcaaattaaggattcaaatcttgttattgtaaaaaaagaagtctttaatttctcacttctagttctagtgctgttgctgctgttgttcttatgtgatgtaagttgaataaatatgatttggtgattgtactttgtagagttagtgacttttgttcgttctcttaattctaattccaaacaagagtactttcggctggcttccttttagct

SEQ ID NO: 52082 - DNA, 380 bp, Glycine max
  Clone ID: LIB3167-022-P1-K1-A8
ccttagtcatcctcttctttcatctttctccctaacggtatcgagggaaaaatatggcggaagaacacagatgccaggcaccgcgcttctgcgccaacaattgcggtttctttggcagccctgccacgcagaatatgtgctccaagtgctaccgcgatttccagctcaaggagcagcaatcttccaacgccaagatggttctcaatcagtcgctggttccttcaccgccaccggcggtgatttctcagccgtcgtcttcttcttcggccgggggagatccgtcatcggcggtggttgatgacgcgccacgcgagtcggaggaggttaaggcgccgcagcagaaccggtgtatgacgtgcaagcggcgcgtggggctcaca

SEQ ID NO: 52083 - DNA, 374 bp, Glycine max
  Clone ID: LIB3167-022-P1-K1-A9
ctctcacatgtcaaacctcaagctacccatcttcctctgaaacactttttctcccctttcctttttttacacctttcactgtgtaaatagggagggcatattgccagaggattttggctataatgactgcatctgggttgagtggttgtcccacaagatgtccacagctaccttttcataccatgggatcacgccatgcccgggttatgggcttctctgtggctgggagaaataaacaaggggtagcatttcgtcaagtggaaagaacgagttttttgtctcctatattaaaatgcaatagacaacttcagttggtcaaaagtgccatggatgcttcatatggtgatatgtcaaatgattctgctgctgctttt

SEQ ID NO: 52084 - DNA, 397 bp, Glycine max
  Clone ID: LIB3167-022-P1-K1-B1
ccgaaccaaactcaaaaccctaacaaaccataaacagttgctgccatattcaccaatggctttctccaaggcaatgtttctcgccgccgtaatgtcggtgctcgtcgccgtcatctccgacgccgaagctccagctccgagccctacgtctcccgccgacgccgtttcgccgtccttcgtcgccggtgttctcgccgccggagccgctcttgcgttcggatctgctctgcggatctgaacgtagctcatggattttctcgtttacatgcgtggatttttagtagaagcggagatttgagcagcattagtatataactctctctctctctctccctccctctctctctatatatattgatattgctatgtagagattattactacatatgttgatttc

SEQ ID NO: 52085 - DNA, 375 bp, Glycine max
  Clone ID: LIB3167-022-P1-K1-B10
gaatggctcaagcaatggcatcaatggctggcttgcgtggttcctctcaggctgtgttggaaggtagccttcaggtgagtggctccacacgcttgaatgtggggagtggaagcagggtggcctcagtcacacgtgcagggttcacagttagagcacaacaacaacaagtgagtggtgaggtacaaagcagccgtagggcagtgctttcacttgttgctgctggtttggccactggctcttttgttcaagctgtgcttgctgatgccaaatctatcaaagttggaccacctcccccaccttctggtggattgcctggaacgttgaactcagatgaagcacgagaccttcagctgccattgaaagataggttctttc

SEQ ID NO: 52086 - DNA, 361 bp, Glycine max
  Clone ID: LIB3167-022-P1-K1-B11
cagaaaatgggcatgttggggtgtcttctgtgcattgtgggatcaactgttattgtgttgcatgcacccgaagagaaatctcttagttctgtacaagaaatatgggaattggccattcaacctgcattcctctcgtacactgcctcagcaattgccgtgacattgttcttggttttgtattgtgctccccgtcatggccagactaatattttggtttatactggaatatgctcgatagttgggtccttgacagtcatgagtgtaaaagcagttggcattgcgataaaacttacactggaaggtgcaaaccaggctttccactttcaggcatgggtttttgcaatggtttctgtcacctgca

SEQ ID NO: 52087 - DNA, 392 bp, Glycine max
  Clone ID: LIB3167-022-P1-K1-B12
tgcacacatggcatcacgcatcatgacaggtgtcatcctaggcagccgaccacgcgtcaacagtgctgaggtcgcaacgcaccgtagatcactactggagaaggctgacaaaggtgccgaagcgagaaacgcaggttatgacggtgacatggatggtagcaatggaaggaggaacttgatgttcgccgcggcggcggctgctgtttgctctgttgctgggatggcagtggcagatgagcctaaaccaggaaccccagaagccaagaaaaagtatgctccgatttgtgtcaccatgccaactgctaggatttgacgcaattgagggactttggtttttattctacttctgatgattggaaatgtacaatgggggagttgtaatgctttgatga

SEQ ID NO: 52088 - DNA, 398 bp, Glycine max
  Clone ID: LIB3167-022-P1-K1-B2
ccaaacgacagcgttctgagtcttttcttcttcgttaccctcttcacatgccttctctctgctaattcccacgatgaccatattttcctaccgagtcaactccatgacgatgactcagtgagttgcactgctaccgacccaaaccttaactacaagccggtgatcggaatcctgacccaccccggcgacggtgcctctggccggctcagcaacgccaccggggtttcttacatcgccgcctcctacgttaaattcgtggagtccggtggtgctagagttattccccttatctacaatgagtcacctgagaaccttaacaagaagctcgatttggtcaatggagtgctcttcactggtgggtgggctgtttctggtccatatttggatactcttggaaa

SEQ ID NO: 52089 - DNA, 397 bp, Glycine max
  Clone ID: LIB3167-022-P1-K1-B3
ccggaactcgtttctaccttcacttcgcacatctcgaaccctctctttccggcaactaggttaaagttcatcaatggcaggtcgtggcaaaaccctaggatccagcgccgccaagaaggccacctcaaggagcagcaaagccggcctccaattccccgtcggccgtatcgcccgtttcctcaaagccggaaaatacgccgagcgcgtcggcgccggtgctcccgtttacctcgccgctgtcctcgaatatctcgcagccgaggttttggagttggctggaaacgctgcgagagacaataagaagactcgaattgtgccgcgccacattcaattggcggtgaggaacgacgaagaattgagcaagcttcttggtgacgtcaccatcgctaacggtggc

SEQ ID NO: 52090 - DNA, 391 bp, Glycine max
  Clone ID: LIB3167-022-P1-K1-B4
tttatattttcttaaagaacaaaatgtttgttatgcttaatatctttaatttggtctgtatttgtattcactccgtcctttattcaagtagttttttctcggcgaaattgcccgaagcctacgctttcttgaatccaattgtggatattatgccagtaatacccttactcttttttcttttagcttttgtttggcaagctgctgtaagttttcgatgatatctgtaatttgagtaatgtcttaaaaaaaaattaagaatttatcagaaaactaaaattcgaacattttaacaatttaaaagatcaaataagtcttacagtgtgaattatcgattccaatattgaaatttttggatatatacgaaaaaatacggaccatctcatcatctacg

SEQ ID NO: 52091 - DNA, 381 bp, Glycine max
  Clone ID: LIB3167-022-P1-K1-B5
cggacgcgtgggtcttcattcattttcaagtttcattttttttttatatagcgaaaagtttaagtgagttgagtgaacgctcacgaatttcaagtgtttcatatttgacatcatggcaagaggtggaaaactaacgaagctaaagtcagtgctgaagaaatggaactcattcggcaacaacagcaagcatagccgccaccacagcatcagcgccgtcgcagacgacgaatcctgctccagatcagacctccacgccgtctacgtcggcaagtcccgccgcctctaccgcgtcgcctccgacgtcgtcgaccaccccgtcttccgggaactcgtcgagagatcccgcgactccgaccaacaacaacaaagcgtagacaccac

SEQ ID NO: 52092 - DNA, 71 bp, Glycine max
  unsure at all n locations
  Clone ID: LIB3167-022-P1-K1-B6
ccggntcgtaaaacccggctccaaccaacgcgtccgcttgcttgttaagatgaatcttagtttatgttgca

SEQ ID NO: 52093 - DNA, 396 bp, Glycine max
  Clone ID: LIB3167-022-P1-K1-B7
tcccttcacaccattctcacaaaacaactttcaaactctgagaaagaatggctgccaacacattgatgagtactgctatctcagccttcccatctctcctttcttcctcaaaatccagatttgccaccgcagttcctctttctagctttggtgtcaccaatgcctcttcttctcgcttttctatgagtgctgactggatgccaggccagcctagacctccttaccttgatggttcagcacctggtgactttggattcgaccctcttcgtcttggtgaagtaccagagaatcttgagaggttcaaagagtcagaactcattcactgcagatgggccatgcttgctgttccagggattttggttccagaggcattgggcttaggcaactgggtaaagg

SEQ ID NO: 52094 - DNA, 386 bp, Glycine max
  Clone ID: LIB3167-022-P1-K1-B8
agccaccagtgtacaaaccaccggtttataagccaaaaccaccggtttacaagccgaaaccaccggtttacaagccaccatataagaagccaccatacaagaaaccaccttatggaaagtaccctccagtagaggacaacacccatgcctaaagcaagcaatgaggtctattatctacttaataaataagaggaactgctttgtgttttctagcattgtgatttacaacttcgtagcaatgcatattcttgactcttgcatgcacttcaatccttcgtagcattaatgatgtggccaagtcatcatgagcatcatacttatttctttgtgaatgtaaatcaaaattataagagagaaaatggtgcttttgtactacagattactat

SEQ ID NO: 52095 - DNA, 385 bp, Glycine max
  Clone ID: LIB3167-022-P1-K1-B9
cacagttctactctacgctctaaaccctttctctctctctctctcgatctatcatggctttgcccaatcagcaaaccgtggattaccctagtttcaaactcgtcatcgtcggtgacggcggtacaggaaagacaacgttcgtgaaaaggcatcttaccggtgaattcgagaaaaaatacgaaccgaccattggagtggaggttcacccattggatttcttcacaaactgcggaaagattcgcttctactgttgggatactgctggacaagagaagtttggtggcctcagagatggatattatatccatgggcaatgtgcgattataatgtttgatgttactggccgtctaacatacaaaaatgtccctacctggcaccgggatct

SEQ ID NO: 52096 - DNA, 61 bp, Glycine max
  Clone ID: LIB3167-022-P1-K1-C1
ccgacgctaacgatttatacgcaggctttttcgctgccacgtgtgctaagtaacacaagga

SEQ ID NO: 52097 - DNA, 326 bp, Glycine max
  Clone ID: LIB3167-022-P1-K1-C10
agaataaacactcgagaaatttctcacttagggtttggatttttcgagtaatcttctctctccgtcacttcatctcacgcgatctcgttccgatcgcacgcgttttaatgatcgtcgtcttccgcggcctctgattcggctctgatcgtcctcgccgcacctctccgcacctctccgcacctctccgccggaaccatgatctccgtgcagggcgaccaccaccgtcaccaccaccactaccaccaccagccgcagcttcccggctctgccgacacctctcggcagcagttcaccgcggatcgcgtcgagccattctccgtcaagca

SEQ ID NO: 52098 - DNA, 402 bp, Glycine max
  Clone ID: LIB3167-022-P1-K1-C11
cccacgcgtccggtaaattaagagcatggctgcacaagctcttgtatcatcatcatctcttaccttctcagccgaggctacaagacaaagtcttggaccaagatcactccaatctccatttggcttctcaagaaaagcctcctttcttgttaaggcagctgctactccccctgtcaagcaaggatcagacagacctttgtggtttgcatcaaagcaaagtctttcctacttggatggcagccttccgggtgactatggatttgaccctctgggactttcggaccctgaaggaacaggagggttcattgagccgaaatggctagcatatggtgagataatcaatggtcgttatgcaatgttgggtgcagttggtgcaatagcacctgaaattctaggcaaggc

SEQ ID NO: 52099 - DNA, 154 bp, Glycine max
  Clone ID: LIB3167-022-P1-K1-C12
aacaaaggaatacatccatggcgaacaatatagatcagactccaaaacagttaaccaacaagcttacttttatgccagagacctcgaagtccatcccaaggacacatttgtgttcagtatagatggcaccgtactctctaatattccatactac

SEQ ID NO: 52100 - DNA, 336 bp, Glycine max
  Clone ID: LIB3167-022-P1-K1-C2
ctcaatggcatcatcatttgtgggtactttattacccaaccacttcacacaaaccaaacactcagctgttcctgcaagtagatcaggtgctccaagaaggaggagagtgcacttagcaacaacaagagcagagaccatgactactgtcatagaaaaactgggcattaagattgagaggaaccctcctgagtccaagctcactcaactgggtgttaggcaatggcccaaatgggggttgccttcaagtaagttcccatggacatatgaagccaaagagacttgctatcttctggaaggaaaagtgaagtgcttacctagtgggttcgaatgagtcat

SEQ ID NO: 52101 - DNA, 308 bp, Glycine max
  Clone ID: LIB3167-022-P1-K1-C3
cccacgcgtgcgcccacgcgtgcgttaacatttaaagagtcagggtatcggatgcaaagatgtaaaacctatattattaggccgtgcatgcaccctgtgaatgtcacgacaaattctcgtgggaaaagtactacgaaagctaatgcccgtacagcgcccacttgatcgtgaatcacctaccaagcatcttcaccccagaccttgcccccatcgttcacctcaaactcgttccttggggcaatgccaaactccgtgccggcgccaccttagactgccagcatgggccatctgagtgctggcatgacaca

SEQ ID NO: 52102 - DNA, 366 bp, Glycine max
  unsure at all n locations
  Clone ID: LIB3167-022-P1-K1-C4
aaaacgcgacccatcactgtgtgtttaacacacagcagaaaagaacaaaccgcaggttcttcctaatcgaaacggttccaaagtagtgaataaacaaattctcgtgcctagggttttcccttttcttcgattcacactcccagagcgaagcaaccgtcatgggaggaggcgaggagaagcgacaccagatgatgcagaacctcttcggagatcaatcggaggaggaggaagagctcgcctttccttccgccccgcccctcgtttccgcaatgccgccgacgccaacaaatgcgcctnctnctncgtcttcaccttcgtctgcgacccctccctcgtccacgtcgccatcaccctcgacgtcgagta

SEQ ID NO: 52103 - DNA, 343 bp, Glycine max
  Clone ID: LIB3167-022-P1-K1-C5
caacgcgtccggttcctcaagccaccgtaccgtgttgcctctctgcaatctacagccaaaatgcctttcaagaggtacgttgagatcgggagggttgcccaaatcaactacggcaaggaatatggcaggctcgtcgtcattgtcgacgtcattgaccagaacagagctcttgtcgatgcccctgatatggtgaggtcccaagtcaatttcaaaaggctttccctaaccgatattaagattgacattaagagggtccctaagaagaaagatcttgtcaaagtcatggaggatgctgatgttaagaccaagtgggagaagagttcatggtgcaggaaacttattg

SEQ ID NO: 52104 - DNA, 364 bp, Glycine max
  Clone ID: LIB3167-022-P1-K1-C6
ccggttcgtaaaaaccggctcggcccaagccgtccgaggaacagaaggaaactggggttgaagatatttagtcatgtttataaaaagatcaagcaaagtgatgggtttaaatttgactttagtattgaaaaccaggtccgagaaatttttagatcttgggctgatgaagtagtgcaagagttcttggggaatatagatgagtgtcaagaatggcatcgaagtctatcagctggcgatttcctacagttgagacacattagaaatcaattaccacctgagcttgttgatgcttatgataagttccaagagcaggtagataaacatttgaatcctatagaagctaggaaggcgatagaggaagaag

SEQ ID NO: 52105 - DNA, 247 bp, Glycine max
  unsure at all n locations
  Clone ID: LIB3167-022-P1-K1-C7
aggaacagaaggaaactggggttgaatanatttagtcatgtttataaaaagatcagagcaaagtgatgggtttaaatttgactttagtattgaaaaccaggtccgagaaatttttagatcttgggctgatgaagtagtgcaagagtttttgaagaatatagacgagtgttaagaatggcattgaagtctatcatctggcgagttcctacagttgtaacacattataatttaatttcctcctgtgctt

SEQ ID NO: 52106 - DNA, 360 bp, Glycine max
  unsure at all n locations
  Clone ID: LIB3167-022-P1-K1-C8
cccacgcgtccgattccaatgggatcagtttgtgaagagcgatggataacagttaccatcacaacggtggcattggtgatagcttcttcagcaccattattattggcggcatgcccttacacctccatcttcagcttcggtgattcacttgcagacactggcaacttgtatttcagcccctacccacccaccaaccactgccttttccctccctacggcgaaaccttctttcaccatgtcactggacgctgctccgatggccgcctcatcatcgatttcatcgctgagtcactggngattccacgggtgaagccgtatttgggaataaagaatattgggagatggagtgtggaagaaggg

SEQ ID NO: 52107 - DNA, 398 bp, Glycine max
  Clone ID: LIB3167-022-P1-K1-C9
gcctattgcacattcttcatcacttcattcaacatttctctctcccttagctagtttttaccaatggctgctgcggttagtgctgcagtctcttttccatccaccaagtctacctctctcccaagcaggacctccatcattaccccagagagagttgtattcaagaaggcttcattgcaatacagagatgtttgtagcagtggaagggtagtttccatcagagctcaagtcaccactgaggctccagccaaggttgaaaaagagtccaagaaacaggatgaaggtgtggttgtgaacaagttcaaacccaagaccccttacgttggtagatgcctgctcaacacaaagatcactggggatgatgctccaggagaaacttggcacatggtcttcagcac

SEQ ID NO: 52108 - DNA, 200 bp, Glycine max
  Clone ID: LIB3167-022-P1-K1-D1
aaccggggcggaccacacgcgtccgacaccctctggaataagcattttggtattttcagctaaaaatggagagcagctgcattctggcttttcttttcctgctcattctccactcaagtacaacaaaagctgccttcagtgttggtggtggagttggtgtaggtgtaggtgtaggtgtcggtgttggagggggagctggc

SEQ ID NO: 52109 - DNA, 398 bp, Glycine max
  unsure at all n locations
  Clone ID: LIB3167-022-P1-K1-D10
ccagaacaagtggggaagctgaagaagaaggccaatgatgactcaacanaagaagggtcaagaccttatagcagatttgaagctattgctgcacatatatggagatgtgcctctaaggctcgtaacctggttaggaataacccacctttagtccggttcaaggccgttattcgcaataactaaatccaccttttcctaagaattattttgggaatgctttgtccttaacaacagcatcatgtcacgttggagatgtcatatcaaattctttgagttatgctgctcagaagataagggaagcaattgaagtggttacatatgagtatatatggtcacagatagatgtgattagaggtcaggagcaactggataatgcaagggcttttgtctttggacaa

SEQ ID NO: 52110 - DNA, 386 bp, Glycine max
  Clone ID: LIB3167-022-P1-K1-D11
cccacgcgtccgaaacagtgtgatgaaaatgaaggtccttgttttcttcgttgctacaattttggtagcatggcaatgccatgcgtacgatatgttccctctccgaatgaacactggctatggtgcccgtactccggaggtgaaatgcgcaagttggaggcttgctgtggaagcacacaacatctttggctttgagaccattcctgaagagtgcgttgaagcaacaaaggaatacatccatggcgaacaatatagatcagactccaaaacagttaaccaacaagcttacttttatgccagagacctcgaagtccatcccaaggacacatttgtgttcagtatagatggcaccgtactctctaatattccatactacaaaaaacatg

SEQ ID NO: 52111 - DNA, 347 bp, Glycine max
  Clone ID: LIB3167-022-P1-K1-D12
atttggtcactgacctatcttggtagagatttgaagtttaaaccttcaaattaatcaaaccattttaatttgcctttagattctgagtcactgctgctatggcgctacgcgtacttcttgtgttggggatgttgctgatgttgtgccttgttaaggtttcatctgatccaaagatagaagaagaaatactggaagcagaagaagaactgcagtttcccgataacgagccacttatcgtgagagacgcgaacagaaggctaatgcaagatatggattgtggtgggttgtgcaagacgaggtgcagtgcacattcgaggcccaacttgtgcactagggcctgtggcacg

SEQ ID NO: 52112 - DNA, 398 bp, Glycine max
  Clone ID: LIB3167-022-P1-K1-D2
ggaagttgagattttttttattggtctttgcatttcttttgcacgttttctagaagtttttgactcactttggtggtgttgatttcatggccacctcttagtcccagcatcgctgcgtttttgtggaattttgcaatttggattaatgggtttcgacatttgcgttctgaatggaactcaaggtcaccttccccatgcttgaaagtaagagtaaggaaatgttgaggatcttgcccgtttgcaatttcagacaactcctatctatattgatgtagatgatgggagaaccaaggtcacaaatgaaagattgcttcagggttatcttgtggttccctgtgccaagcgatttattgttctctattcctttttgaagagacaccagtcaaaaaaagtgatgg

SEQ ID NO: 52113 - DNA, 380 bp, Glycine max
  Clone ID: LIB3167-022-P1-K1-D3
ggcaacagaaacaaaagtggcagtattaggtggcatcaccgaagtgcagggagctgccaacagcgtcgagatcaacaatctcgctcgctttgctgtagaggaacaaaacaaaagagagaattcagttctggagtttgtgagggtgattagtgcacagcagcaagtggtttctggagtgaattactacataacattggaagcaaaagatggtgagattaaaaatgagtgtaaagcgaaagtttgggagagggaattccaagagttgctagaattcatgccaacattaggtgcaaggggcgagatcgaccatctcgctcgctttgctgtagaggaacaaaacaaaagagagaatgccaatttggagtttgtgggggtgatta

SEQ ID NO: 52114 - DNA, 373 bp, Glycine max
  Clone ID: LIB3167-022-P1-K1-D4
ggggatctttcaaacgagaactagtggaggacattcgtaactatgctgacttacgctccacgacattgtgtgcaacctactggcactgggtgaccataactgaaccatatggctacgggcgcgaacgctacagttgtggaacactggctccaagactgtgtggtggctacgtcagtaaatgtaccggtggcgatcttctcaccgagccctacatctgtaaccaccacctaatacttgctcatggagcagcagtcaattggtcgccaccaaatacgaaactcatcgtgaagggcgaagtggagtcaccatagggactttcttctgtgaaccaaaatctaatagtgatgctgatcgcaaggcagcaaggcgagct

SEQ ID NO: 52115 - DNA, 369 bp, Glycine max
  Clone ID: LIB3167-022-P1-K1-D5
ccaacgcgtccgagtgaatgctgccaaagctgttgaagcagaaaaggtcagttatgacaatgacatggatggtagcaatggaaggaggaacttgatgttcgccgcggcggcggctgctgtttgctctgttgctgggatggcagtggcagatgagcctaaaccaggaaccccagaagccaagaaaaagtatgctccgatttgtgtcaccatgccaactgctaggatttgtcgcaattgagggactttggtttttattttacttctgatgattggaaatgtacaaatggggttgttgtaatgctttgatgatttcatttgatcctcactgtacaagatgttcataaaactatcgagctttggctttgtgtc

SEQ ID NO: 52116 - DNA, 422 bp, Glycine max
  Clone ID: LIB3167-022-P1-K1-D6
ccggtcgtatatccgggtcggccacgcgtccgcaaaacacctcccaaagttgatccagattttccctacaaatttgggatcattggtgatttggggcaaacgtttaattctctttccacccttgagcattatatacaaagtggagcgcagactgtcttatttgttggagatctttcttatgctgataggtaccagtacaatgatgttggtttacggtgggatacatggggacgatttgttgaaaggagtacagcatatcatccatggttatggtctgctggaaatcacgaaatagactatatgccttacatgggagaagttgttcctttcaaaaactatctttaccgatatactactccctacttggccttcaatagctccagtccccttttggatgcagtcaggcgtgcgtctgctcatat

SEQ ID NO: 52117 - DNA, 259 bp, Glycine max
  Clone ID: LIB3167-022-P1-K1-D7
cccacgcgtccgcctctttcttcctcttcctcagtagtgcgattttcgattctcttctctgcaactatgcctaaccctaaggtcttacttcgacatgaccatcggcggtcaacctgccggccgcatcgtgatggagctctatgccgacgtgactcccagcaccgacgagaacttacgcgcgctctgcaccggcgagaagggcgccgggcggagcggcaagcccctccactacaaaggctcgtgcttccaccgcgtgatc

SEQ ID NO: 52118 - DNA, 397 bp, Glycine max
  Clone ID: LIB3167-022-P1-K1-D8
cccacgcgtccggggttcgggtgtgagagcgagaatcagaagatgaagaaggaagacacagtgaagctgatcagtgccgaaggttttgaatttgtggtcgacaaagaagctgcttcacagaccatacataacatgcttacttctccagggagtttcgctgagaggcagcacggcgaagttacctttcctgagatcagcaccaccattctcgagaagatttgccagtacttttattggcatctccaattcgccagtgggaaggagacggaatttcccattgaacctgaattaactctggagctaatgatggctgccaattacctccatacatagcattttgacttccccaagggtgatagttcttcggccacataatggaactattgcctagttgggc

SEQ ID NO: 52119 - DNA, 359 bp, Glycine max
  Clone ID: LIB3167-022-P1-K1-D9
cccacgcgtccgcacaggcgcagacgcaaacgcaaacgcaaacgcaaacgcaaacgcagagcgtgatccattgacgaagatggtgcagcgtctcacctaccgcaagcggcacagctatgccaccaagtccaaccaacacagggtcgtcaaaacccctggtgggaagctcgtttatcagactaccaagaagagggccagcggacccaagtgccccgtcactggcaagaggattcaggggattccacacttgaggcctgcagagtacaagaggtcaaggttacccagaaaccgtaggactggcaaccgtgcatatggtggagttttatctggaagtgccgtcagggagaggattattcgag

SEQ ID NO: 52120 - DNA, 395 bp, Glycine max
  Clone ID: LIB3167-022-P1-K1-E1
gccgggctttgtcgaaaataaaaaatgtttttttaaaatggggatgctcaattatggtgagcttctgcgacaaagtaagaggctgctggacaaatcaatcactgaaagtgagcgcgagctgcatggcttgtacacgcaagagaagaaattgattgccgagataaagaaaagtgccaaacagggccagatgggagctggtcgagttatggcaaaagatcttgttagaacaaggcatgacgtggagaaattttataagctaaaatcttatctacaaggtgtatcacttagaattcagactttgaaatcaacacaagcaatgcgtgaggctatgaaaggcgtgacagacgccatggtgcaaatgaataggcatatgaacttgccattattgcagaaaa

SEQ ID NO: 52121 - DNA, 341 bp, Glycine max
  Clone ID: LIB3167-022-P1-K1-E10
atccttgcaacacacattgtcttgtcggcaaaatcttccaccaacaacacacagccatggcaggctcaaacattctttctcactctccttcccttcccaaaacctacagccactccttaaaccaaaacgcgttatcccaaaagcttttttttctgcccctcaaattcaaagccaccacaaaaccacgtgctctcagagcggttctctcgcagaacgctgtcaaaacctcggtggaggacacaaagaacgctcattttcagcactgtttcaccaaatccgaagatgggtatctgtactgtgaggggcctcaaggtgcatgacatcatggaatctgttgagag

SEQ ID NO: 52122 - DNA, 398 bp, Glycine max
  Clone ID: LIB3167-022-P1-K1-E11
cccacgcgtccggtcttactgtgtggtgactgtgctctgctctcatctcattcatattcatttcaatggcaactcaaggtcaagtcattacctgcaaagctgcggtggcctggggacccaacaagccctttaaccgtccaagacgttcaggttgctccgcctcaggccggcgaggtccgtgtccaaatcctcttcaccgctctctgccacaccgatgcttacacttggggcggcaaggatcccgaaggtctcttcccctgtattctcggccacgaagctgcagggattgtggagagtgttggagaaggtgttactaatgttcagcctggggatcatgtcattccctgttaccaggctgagtgtggggagtgcaagacttgcaaatcggggaagacaaa

SEQ ID NO: 52123 - DNA, 404 bp, Glycine max
  Clone ID: LIB3167-022-P1-K1-E12
cccacgcgtccgacttcctgcaagggttatcagcagcaccactgtgacactcagtgcagaagaaaatggcaaggtagtggttgctaagaagaatcctatggagactcagagggaaatcactgccatttggaagaagtttgtgttggagaggaagaagaacaatgacaagatgaatggtgtttgttagtgttagcttcaagggggtgttgtgcctatgcctctgccttattgtacttctttattatatatataatttgggcagtaagtacttttgattgagtcaagctatttatctgtttcagttgtttattgatgagaggcaaatattaaattgtgttttcgtttgtacaagtatgattcactgtattttgactattttctctgaatcatgaattatatttatc

SEQ ID NO: 52124 - DNA, 252 bp, Glycine max
  Clone ID: LIB3167-022-P1-K1-E2
caaaattctcttccgtttcaggattagggtttcaccgttacagtgaaacatggcaaaaccaaagcgaatctctctgcgtatctttgcgctgctcctcttgatttccacctcttcgtttcagcttctccgcgcttccgatgacgccgatgatgatgcgatcttctatgattcgttcgacgaggactttgtagaccgttgcgctgtgtctgctaaaggacttgtactgacgttgtattacacctgtgaaatttt

SEQ ID NO: 52125 - DNA, 337 bp, Glycine max
  Clone ID: LIB3167-022-P1-K1-E6
cttcaaatcaatgaaagtagtttgaacaattaataaaactgagcttcctagttctattctataccagttgcgctggtagatttacttatggcctgccattactgcgatatatatgttatgtatctgggcatcaattatgaagatcaaaattttcgtatctcacatggaaaatgcctgtttttggttgtcttaggcttaaagatgatctgtctacctaagtatagaggccaatcaatatacactgacagtcacatgttttaatgtgatgatacagttactgagatttatatgtgtactaatattacttagtctaattttaaaatttgaaatttgctat

SEQ ID NO: 52126 - DNA, 350 bp, Glycine max
  Clone ID: LIB3167-022-P1-K1-E7
aaacattcttgtggggtaggtactctttggaaatgtctgctgttatttacaaggattgggttttcaccgatcaagcattgcctaatgatcttgtcaagagaggagttgctgttaaggatccatctgctccccatggagttcgacttttgatcgaggactatccttatgcttctgatgggctagagatatgggatgctatcaagtcttgggtggaagaatatgtctcattctactacaagtcagatgaggaacttcaaaaagaccccgagctccaagcttggtggaaagaacttgtagaggtgggtcatggggatttgaaggataagccatggtggcaaaagatgcaaact

SEQ ID NO: 52127 - DNA, 357 bp, Glycine max
  Clone ID: LIB3167-022-P1-K1-E8
acccaatcttcgccttcgcccacaacaactcctccttcaggatcgctgccaacgttactttccatttttacccttcatcctcgagaaaaaaatggcgaacgcagcatctggtatggccgtccatgatgagtgcaagctaaagtttctggagctcaaggcgaagaggacgtaccggtatatcgtttttaagattgaggagaaatcgaagcaagttattgtggagaagctgggtgaccctgcaaatggctatgatgaattcgctgccagtctttctgctgatgagtgtcgatatgctgtttatgattttgtatttgtcacttaagatgatttgcctattgtagcagaatttattttcat

SEQ ID NO: 52128 - DNA, 391 bp, Glycine max
  Clone ID: LIB3167-022-P1-K1-E9
cccacgcgtccgcccacgcgtccgcccacgcgtccgctcagaattctctaaaagagatctttttctgctctttgaagaaagaagggtctttgcttgattttggagatgtctctgctctcagatctcatcaaccttaacctctccgataccaccgagaaggtgatcgcagagtacatatggatcggtggatcaggaatggacctgaggagcaaagcaaggactctcccaggaccagttagcgacccttcagagcttcccaagtggaactatgatggttccagcacaggtcaagctcctggtgaagacagtgaagtgattttatacccacaagccattttcagggatccattcagaaggggtaacaatatcttggttttctgtgatgcctaca

SEQ ID NO: 52129 - DNA, 328 bp, Glycine max
  Clone ID: LIB3167-022-P1-K1-F1
gtccgggtggctgcgccgcatgcatcggcggtggttgcttatgaagtggcggcgatggctgaagctgcctcgaacgacaacaggggacagcttctgctgtttgtggttacgccggctattgcttgggttctttacaacatcttgcagcctgctcttaaccagctcaacaggatgagatcccagtgatttaatgtttgtgaaatttaaatagggaaggggcttaattaaatgctgtgggatatcaattatcatcatgtgatcatactaattgttgtcatgtaacttgcttcctgcaacttgtatctaatgctatatccgcttttctttt

SEQ ID NO: 52130 - DNA, 406 bp, Glycine max
  Clone ID: LIB3167-022-P1-K1-F10
cccacgcgtccggagaacaagaacataaggtaaccacagcggcggtaacagaagaacaagcagagaatgggtcgagtgagaacgaagacggtgaagaaatcctctcggcaggtgatagagcgtcactactcgcgcatgaccctggacttccacacgaacaagaagcttctggaggaagtggcgataatcccgtcgaagaggctaaggaacaagatcgcggggttctcgacgcacctgatgaagcgcatccagaagggccctgtgcgcggcatctccctcaagctccaggaggaggagcgcgagcgccgcatggacttcgtccccgacgtctccgtcatcaacaccgaccacatcgaggtcgacatggaaaccctcgacatgctccactccctcggtatcaacgaca

SEQ ID NO: 52131 - DNA, 408 bp, Glycine max
  unsure at all n locations
  Clone ID: LIB3167-022-P1-K1-F11
cccacgcgtccgcaagcgcctcttgatagggtctcccattttcaattccttctcagtttccttttctctgaaaaaacatgttgagggttgcagctagaaggctctcttcttctctctcctcttcttctccgntgcggcccaatcacgccgcttccgcttttctctctcgaaacgacgtcgtcgtcgatgaccacagatctgttccttcctcccatccccttcttcccttcagaggttttgctactgaatccctgatccacccaatagaaaacaccattattccccagattctgccaactgttactgctgttaagaaccctacttctaagattgtctatgatgatcacaaccatgaaagatttcccccaggtgacccaagcaagagggcatttgcctacttcgtactta

SEQ ID NO: 52132 - DNA, 304 bp, Glycine max
  Clone ID: LIB3167-022-P1-K1-F12
attatgaagaggaagaagaagatgaagtatgaaaatgctagaaaagttccctctgcttgatcttcttcctcttcctccttggccgaggaaaagaaacaagaagatcaagttcagctaagattcaacagaatgccagaatcttatgctgctcatatgaggcttagacttggaagcttcaaggctagaagcttttctcttgcagaactgcaagaacatgatgatgaggaagaaggtgatgatcatttaattaacatttaacaatagggggttaattttggtttaattctttttgtaattggggggt

SEQ ID NO: 52133 - DNA, 212 bp, Glycine max
  Clone ID: LIB3167-022-P1-K1-F2
ctcaaccggcccaatttagcataagcccagcatggccaccgcaacagcagcagccacctcgtccttcatggggacgcgcctcctggaggcccattccggggcggggcgggtgcaggcccggttcgggtttggcaagaagaaagccgccgccccgaagaaaggttccagggggtcgggctctagcttcgatagggccctggggtattcgggcg

SEQ ID NO: 52134 - DNA, 384 bp, Glycine max
  Clone ID: LIB3167-022-P1-K1-F3
gtcttcttctctaaaataaaaaaccctaacttctgaacctttcaccgcatcgccaccgattccctatctccactaatcaaagaaaagaaaatgagtagacgctcgagcagaactgtctacgttgggaatctacccggtgatatccgtgaaagagaagttgaagatttgtttctgaagtacggacacataacacacatcgacctaaaggttcccccaagaccacctggttatgcatttgtagagtttgaagatgctcaagatgctgaggatgcaattcgtggtcgtgatggctatgattttgatggccaccggttacgggtggagcctgcccatggtgggcgtggtcattcatcctcaaaagatcggcacaatagtcacagcaat

SEQ ID NO: 52135 - DNA, 391 bp, Glycine max
  Clone ID: LIB3167-022-P1-K1-F4
aaacggatgaggtgtctgagtggtggttgtgatgctgagggtggcgctgcgatggaactcgatttggaggccaatggcttctctgccactaactcccttcacatgccaaaatctccacacgctaaaccctaggcctcgatgtcgcaccttcaagcttttttgtcgaccttcttcttccgccgtcgcgcacacctcgccttctcttttcggcgacctggaccgctacctccgctgctccatgccgcagaactcgccgctccgagtcgcggttcttgtcagcggaggcgtcgatagcagcgtcgctctccggctgctccacgccgctggccactccttgcaccgtttctacctcaagatatggttccaagaagatttcgagaacttttggtct

SEQ ID NO: 52136 - DNA, 412 bp, Glycine max
  Clone ID: LIB3167-022-P1-K1-F5
ctcgttttcgttctcgttctggtttatagatctttgcgaaggaggtttacagcgctcaaccaaagatgcagaacgaggaaggacagatcactgagctttacattcctaggaagtgctccgccacaaacagattgattaccgctaaggaccatgcttcggttcagatcaacattgggcatgtggatgagaatggcgtctacaatggccatttctccacttttgccctctgcggattcatccgtgctcagggtgatgctgacagtgctctagaccgcttgtggcagaagaagaaagttgaagttaagcaacagtagacacccatgatagtttgttacttcgttatgtattaatttctactcttgctagagatatttgagtactatgattgtcgttttgagcacaaatactcatt

SEQ ID NO: 52137 - DNA, 411 bp, Glycine max
  Clone ID: LIB3167-022-P1-K1-F6
attatgaagaggaagaagaagatgaagaagaaaatgctagaaaagttccctctgcttcatcttcttcctcttcctccttggccgaggaaaagaaacaagaagatcaagttcagctaagattcaacagaatgccagaatcttatgctgctcatatgaggcttagacttggaagcttcaaggctagaagcttttctcttgcagatctgcaagaacatgatgatgaggaagaaggtgatgatcattaaattaacatttaacatagggttttatttttgttttattcttttgttattgtggttgttactaaataaaattaaatagtattaagtaactgttaaaaaacttatccttttcttttttttacttttgttttaaaaaaatggattttgcttaggggtgtactgtgcatat

SEQ ID NO: 52138 - DNA, 383 bp, Glycine max
  Clone ID: LIB3167-022-P1-K1-F7
cccacgcgtccggtgaaagagaatccttggcgaagagaagagaaaaattaagatggaggggaaggagcaggatgtgtcgctgggagcgaacaagttcccggagagacagccgattgggacggcggcgcagagccaagacgacggcaaggactaccaggagccggcgccggcgccactggttgacccgacggagtttacgtcatggtccttttacagagcagggatagcagagtttgtggccacttttctgtttctatacatcactgtcttaaccgtcatgggagtcgccggggctaagtctaagtgcagtaccgttgggattcaaggaatcgcttgggccttcggtggcatgatcttcgccctcgtttactgcaccgctggca

SEQ ID NO: 52139 - DNA, 139 bp, Glycine max
  Clone ID: LIB3167-022-P1-K1-F8
gacccacgcgttcgaccacgcgttcggtgaaagagaatttttgtcgatgagatgagaaaaattaaggttcgttggatggagctcgatgtgttgctcccagcaaactatttcccagtgagagacagtcgattggtacggc

SEQ ID NO: 52140 - DNA, 262 bp, Glycine max
  Clone ID: LIB3167-022-P1-K1-F9
gtgagactaacgaagcaacgatgtcctgtatgctgcgcttgcccgtctcggttctgcagccccaaccgcctcaattccctcgcccattcactgcattcgccgcagccgccgccgtatcctcctccgaccgctcctttctccggaatgctctgaattccttcttctctgttaacccatcaatgcctctcttgggttctctgagtttagccgacagtggggtttgcgtggttgaggcaaaaaccggaacttctttcctttgatt

SEQ ID NO: 52141 - DNA, 252 bp, Glycine max
  Clone ID: LIB3167-022-P1-K1-G10
gcgtccgcccaaagagaataagatagaatggtgaaaatgtcgcagggtggggccaacacattcgtgcgaggaaaaccctttcttgcagttgcagcagctcccactaaaaatgttcggagagcggttcagtgcggtgtgtggtgcaagaagaaggagatacacccgcaattctacgaggaatcgaaggtgtactgcaacggggagctggtgctgacgacaggtgggacccagaaggaatacgttgtggacgtg

SEQ ID NO: 52142 - DNA, 290 bp, Glycine max
  unsure at all n locations
  Clone ID: LIB3167-022-P1-K1-G11
caacgtccccgccgccgtccaggcggccattctccgcagagcgaagtcccgccgcgttcccattctttncgaccccgnctttggccgctccctacgccggggtcgagcacgacgacgccttcggggcctcccccttcctactcgtcaccgacactggcacctccgccgggaaactcctcggctatgtcgcgaggagcgactggacgaatcaaaccgacaagggcttgagagttggggactacatggcgccacctcccaagccggcgccatggaacgccgacctaaataaa

SEQ ID NO: 52143 - DNA, 426 bp, Glycine max
  Clone ID: LIB3167-022-P1-K1-G12
cccacgcgtccgcccacgcgtccggcgaacgttcgcatgttacgcaacacaaagggggccgcgcaataggcgtgtagggaaaccgtttcattttcaagcgcgtgactttcaaatccaatcttccataccaatggccttcagcaacgctctcagatctgccgcgaagctagtcgcttattccgaatcctccctctctaactcagtgagcagaggttttcattcaactggcatgaagaggatgggaggtggacatggccatgatgagccctattatcttcatgcaaagcacatgtacaacttggacaggatgaagcaccaggggttgaaaatgtcccttgctgtattcactgctttcagcattggggttgcagttccagtgtatgctgtcattttccagcaaaagaagacagcttctagctaggctcg

SEQ ID NO: 52144 - DNA, 348 bp, Glycine max
  Clone ID: LIB3167-022-P1-K1-G4
ccaagacctccttctcacgtgctgcgaaggcttcggcaccaccgctctcgccgccctcgcctccaactgcagattgctgagagtgcttgaactagtggaatgcgtggtggaggttggcgacgaggaattggattggatatcgtgttttccggagattgacgctcagacatatttggagtctcttgtttttgactgcgtggagtgtccaattaacttggaggctttggagaggctcgtggcccggtccccctctttgaggaagctcaggctgaatcgttatgtttccatgtctcagctgcatcgcttgatgcatcgtgcgccgcagttgacgcatctgggaactggttc

SEQ ID NO: 52145 - DNA, 414 bp, Glycine max
  Clone ID: LIB3167-022-P1-K1-G5
agggaaatattgagaaaagcagatagttatggagacggtcgtttgagcaaagaagaacttaagaaagctttcaaagaatttggatccaagatgcccggatggagagcatgtcgtcttctaaggaaagctgacaccaaccacgacggagtactcaccatggaagaacttgacaccattgttgattttgctcttgctaggtacacattcaggaagtaaatatatatgcatgatatgatatcatcacgcccatatgccttaatcccaaagcatctaaatgaggcgcatgtacgtctataactaattatttatggtagaataatatgagctagcaggctatatgatcggcctctactttgtataatcaaaactaggatataatggaagcatgtttgcttcttggtcgggtagatatct

SEQ ID NO: 52146 - DNA, 413 bp, Glycine max
  Clone ID: LIB3167-022-P1-K1-G6
cccacgcgtccggcgaacgttcgcatgttacgcaccccaaggtggacgaggaatatgcgtgttgggaaaccgtttcattttcaagcgcgtgactttcaaatccaatcttccataccaatggccttcagcaacgctctcagatctgccgcgaagcttgtcgcttcttccgaatcctccctctctaactcagtgagcagaggttttcattcaactggcatgaagaggatgggaggtggacatggccatgatgagccctattatcttcatgcaaagcacatgtacaacttggacaggatgaagcaccaggggttgaaaatgtcccttgctgtattcactgctttcagcattggggttgcagttccagtgtatgctgtcattttccagcaaaagaagacagcttctagctaggctcg

SEQ ID NO: 52147 - DNA, 199 bp, Glycine max
  Clone ID: LIB3167-022-P1-K1-G7
gaagaagaccaagatggtgaaaccgattgtgccgcagaaatcagtgatctaccagctctgcgcttttcaggacaagatattgcccagtctctggagggactagaccacaaagatctactacaaggactgcccgaaaacaatcaacgaccatttttggctaggatccggagaccgaaccgacacaactgatcagaactac

SEQ ID NO: 52148 - DNA, 356 bp, Glycine max
  Clone ID: LIB3167-022-P1-K1-G9
attcaccatgacagcttccatccttggcagcccagccgtcaccaaccggtcggcagtagcaacgcagaggagatcactcgtagtgaatgctgccaaagctgttgaagcagaaaaggtcagttatgacaatgacatggatggtagcaatggaaggaggaacttgatgttcgccgcggcggcggctgctgtttgctctgttgctgggatggcagtggcagatgagcctaaaccaggaaccccagaagccaagaaaaagtatgctccgatttgtgtcaccatgccaactgctaggatttgtcgcaattgagggactttggtttttattttacttctgatgattggaaatgtacaatggg

SEQ ID NO: 52149 - DNA, 412 bp, Glycine max
  Clone ID: LIB3167-022-P1-K1-H10
cccacgcgtccgcccacgcgtccgcccacgcgtccgtcctgatatcagaaaaagaaaaaagaaaaaaatgtctctagtgactgcagagatcaaagccaaagcagaggtgtatcatggagatgaactctgccaagagaagtcaaagttgctgctaaaggaggtagggctacctaatgggcttttgccattgaaggacattgaggaatgtgggtatgagagggatagtgggtttgtgtggcttgagcagaagaagagcacaaaccacaagtttgagaagattgggaagctggtttcctatgctcctgagatcactgcctatgttgaggttggtaagatcaaaaagctcactggtgtgaaaaccaaggagctcttggtttggatcacactcagtgagatctttgttgatgatcct

SEQ ID NO: 52150 - DNA, 415 bp, Glycine max
  Clone ID: LIB3167-022-P1-K1-H11
aactgtttggcacccttggttttcctatttagaggttggtggctatgtagaagtatacaagggaggcctaacattagctacggtgagggaagcagggcatcaagtgccaagttaccaaccagccagagccctaactttgatcaaatatttcttagacggcactcctcttcccggtcctcccaaaagaaaggactaggactagtttcttcaaatccacttttcaataattgttgtagtaattattaatttaaggaaaataaatacaattatattatagtggggtttcttggattctattcttgttggcgatctttcattggtaagactcctgtaaatatcattataagctctcgccaaaaattgaacatggcctatgaatggggcaacctaggttctttgaacttcctcgcactca

SEQ ID NO: 52151 - DNA, 402 bp, Glycine max
  Clone ID: LIB3167-022-P1-K1-H12
ctcctctgtcttataactttacctttctatcctcatggagtagtaaagaagtaactaatcaaccacaaacctaaacaaccccttttgcctaaagctccttccttttctccaatggcaacctgggttttatcagaatgtggcttaaggcctcttccaccagtgtttccacggtcaacaagacccatttcgtgccaaaaaccttcaaagtctagatttttaagcacaaacaagggtgtgccagatctgaatctccaagcaagagggttaacatgctgtagttttagggatagaaagtgggaattgggagtgagtgctccactgaaagctgccaccaatgagggagaggaagaagagagaaccaatggggctaataatggggttggtgaggagtttcagaatttg

SEQ ID NO: 52152 - DNA, 369 bp, Glycine max
  Clone ID: LIB3167-022-P1-K1-H2
ttcaaaatgaagcattgcatctcaaaacattttctaagttgtttcgctttgtttctggtgctagtcgcaacaacctatgccactgttgtccctaccaccacccaaaagccaccaagaagctttgcaaaccaattcctcatcccccagaacgcggcacgtgcggtgctgaggctgcggccattggtgtgggactccaaattagcacactacgcgcaatggtatgccaaccagaggcgcaacgattgtgccctagagcactccaacggaccttacggtgagaacattttctggggcagtggcacggggtggaagccagcacaagctgttagtgcatgggttgaagagcgccaatggtacaattattggcac

SEQ ID NO: 52153 - DNA, 395 bp, Glycine max
  Clone ID: LIB3167-022-P1-K1-H3
attgcctccacctgagggccccaattctggtattttggtgatccaagatgaagatttggtgccaacctcttgttttgggttgggagagttccatgaagtgaaggagttgcctttccctcaaaatctaaaccttgagttgttctatagatcaggcatttcactgaatagaaccactcactaccaccatgttgccttcattccagttcttaaccagcccttgtcttccaacaaatactatgtgataaatctcagtgggaaaaaaagaggggaggcatacattaactcaaagggggaagatttggacacattctgtttctacaatgctgtatctgatgtaccactacatccaatagttatcaatgacacatatcaagagtttgagatatttcctagaa

SEQ ID NO: 52154 - DNA, 418 bp, Glycine max
  Clone ID: LIB3167-022-P1-K1-H4
ccatcgttcaatcagatggctgagcagctttataaaacttttcaaggagctccacaagatgctatccctagcttcgataatcaacaatatttttcaaccatgcaacaggttatgcagaatcctaattttatgaccatggctgagcgcctgggtaatgcattgatgcaggatccgtctatgtctgccatgcttgaaagtttttctaatccatcaaataaagaccagcttgaagaaagaatggcacgcatcaaggaggatccatctctgaaacatattttggaggagatagagactggcggtcctgctgctatgatgaggtactggaataatgaggaggttttgcagaagttgggacaagccatgggtcttgccaattcgggagatgcaagtgcctctgctgaaaattctggggcagatg

SEQ ID NO: 52155 - DNA, 427 bp, Glycine max
  Clone ID: LIB3167-022-P1-K1-H5
cacgcgtccgaaaatgctgatgtgcaagcttgagagattttttagcgcgatgcaggggctctcacgtgtcttaaagatgtgctgtggagcgcgatagaaaatcctaaagggttcacgcttgatttcttttttgataccaatccttacttctgaaataccgtcttgaccaaagcatctcatatgattgatgaggatgaacctatattgtagaaagcaattgggacggaaattgaatggtgccccggaaaatgctcgactcagagggttttgaagaataaccctaataagggttcaaagaatgcttaaccaatcaccaaaactgaaagctgtctaagcttcttcaattgtttcaaaccaccagaagtccctgaagatgatgctgacattgatgaagatcttgcttgagaacttcagaatcagatggaac

SEQ ID NO: 52156 - DNA, 422 bp, Glycine max
  unsure at all n locations
  Clone ID: LIB3167-022-P1-K1-H6
cgcgtncgtccacgcgtccgcccacgcgtccgcccacgcgttcggtttgttgtgagctataagctagtttatcgtgaggagaatatgaagttgtttgttttctttgttgctgcagtagttttggtagcatggccatgccatggcgcaggctaccaaaggttccctctccgaatgaaaactggctatggtgagcgttcttcggaggtaaaatgcgcaagttttaggcttgctgtggaagcacacaacatccgagcctttaaaaccattcctgaagagtgcgttgaaccaacaaaggactacattaatggcgaacaatttagatcagactctaaaacagttaaccaacaagctttcttttatgctagggaacacggagtctattacagcgacatatttatattcggcatagataacaccgtact

SEQ ID NO: 52157 - DNA, 356 bp, Glycine max
  Clone ID: LIB3167-022-P1-K1-H7
cccacgcgtccgcccacgcgtccggcaagaatggcacttcgttgcttggtgatgtccctttctgttctcttcactcttggtcttgcgagagaaagccatgccagagacgaagatttttggcatgctgtttggccaaacactcccattccaagttcattgcgagatcttctaaagcctggccctgcaagtgttgaaatcgatgatcaccctatgcaaattgaagaaacacagtacccgaaaaccttcttctataaagaagaccttcatccaggcaaaacaatgaaagtacaattcagcaagcctccctttcaacaaccatggggtgttggtacatggttaaaggaaattaaagacac

SEQ ID NO: 52158 - DNA, 67 bp, Glycine max
  Clone ID: LIB3167-022-P1-K1-H8
gaagtacttcagataatgtgaattatcttgtgtatccgaatccaacttaatgttacttgctttttac

SEQ ID NO: 52159 - DNA, 79 bp, Glycine max
  Clone ID: LIB3167-022-P1-K1-H9
aaaaaaaaaagaaaaaaaaaaaaatatttttaaaaaaaaaaaaaaaaaaaaaaaaaaagggaaaaaaaaaaaaaaaaaa

SEQ ID NO: 52160 - DNA, 412 bp, Glycine max
  Clone ID: LIB3167-023-P1-K1-A1
tccgggcgaccacgcgtccggataactagaaacagtgtgatgaaaatgaaggtccttgttttcttcgttgctacaattttggtagcatggcaatgccatgcgtacgatatgttccctctccgaatgaacactggctatggtgcccgtactccggaggtgaaatgcgcaagttggaggcttgctgtggaagcacacaacatctttggctttgagaccattcctgaagagtgcgttgaagcaacaaaggaatacatccatggcgaacaatatagatcagactccaaaacagttaaccaacaagcttacttttatgccagagacctcgaagtccatcccaaggacacatttgtgttcagtatagatggcaccgtactctctaatattccatactacaaaaaacatggatatgggg

SEQ ID NO: 52161 - DNA, 106 bp, Glycine max
  Clone ID: LIB3167-023-P1-K1-A10
gaactaggtattgcatttgtggtttttacatactgagtttatttatcatttacagcttttctttaacataaaaaaaaaatggtttttaagaatttgcgtttttgtt

SEQ ID NO: 52162 - DNA, 377 bp, Glycine max
  Clone ID: LIB3167-023-P1-K1-A11
cccacgcgtccgcgaaaggatctcgaagacccaccaacgcacgaaagccgggatctttcagaaaatggattcctattcgaagggtgcataaccgcatggataagctcacactaacccgtcaatttgggatccaattcggttccttaggaggtatcgggaaggaattttggaatgtaataatatcgattcatacagatacagaagaaagggttctctattgattcaaacgctctacctacgagatagggatagagaaagaggaaaaaaccgaggatttcacatagtacttttggtcgaaaaatcgatctgatttttttcgtacttttcgctcaatgatgaaatgggtcagattctacaggaccaaaccttgtgggagt

SEQ ID NO: 52163 - DNA, 231 bp, Glycine max
  Clone ID: LIB3167-023-P1-K1-A2
taccggggcggaatccacgcgtcgacctaatcttccctttcctctccgaaccctcgatcactctcacgcgctcctatattcgctcctccaccgtcgctctctcgaacaaccacaacaccatcttcatcacatggcaaacgcagcatctggtatggcagtccatgatgactgcaagttgaggtttttggagctgaaggcaaaaaggacacaccgcttcatagtttttaagat

SEQ ID NO: 52164 - DNA, 391 bp, Glycine max
  Clone ID: LIB3167-023-P1-K1-A3
ctcaccacttgttggggtcctgcaggatcatatcaacgactggaggaaaacagcactttgtttaacatccattttctttcttgctgctgtaatatggttcataggaatctttttgaaaagtgatgtatatgacaaagatgatgaggagcaatctgccacaactagaggaggaaaactgacgccattgcttgacggcagcagtgacactacatccagtcaagtttaattcttttcaaattttagtactataactatgcttcaagtgtatattaacttctagtgtgaagagggtaaaagtcggtagcatactagcatctttactactactaccagtcatgtggaaaatggtggacggtggtttgatactatgttggatatgtatatcatatat

SEQ ID NO: 52165 - DNA, 319 bp, Glycine max
  Clone ID: LIB3167-023-P1-K1-A4
gaaacctttcacggtggtgagtgtgcgatggttgcctaccaggctgtaataaagctatggcacgagaagcagcatcgatcgtctagcgctgattgcaagcgggagaggtgctatggagtataggacaccaaccttgcattgtacgctagacaaggtccacccgccctgacatggctcaggaatcggactctaaggctaaacaagactatgcgatataccgagtcagcgttatgaagtggggcggtataatgcactgcaccaaaggggtaggacctggtaagccgacttaccacggagatagcgaggttatattttacac

SEQ ID NO: 52166 - DNA, 384 bp, Glycine max
  Clone ID: LIB3167-023-P1-K1-A5
tttctctttgtcgcaaagagaagagatctgcctccttttttttatcaaatctatctcttcttcaagaatagttgaaaatggggctgtctttcaccaagttgttcagccgactgtttgccaagaaagagatgcgtatactgatggtgggtctcgatgctgcgggtaagaccaccattctgtacaagctcaagcttggagagattgtcaccaccattcccaccattgggtttaatgtggaaactgtggaatataagaacatcagcttcactgtctgggatgttggaggtcaggacaagatccgtcctttgtggagacattacttccaaaatacacaaggacttatttttgtggttgatagcaatgacagggaccgagttgttgaag

SEQ ID NO: 52167 - DNA, 312 bp, Glycine max
  Clone ID: LIB3167-023-P1-K1-A6
cccacgcgtccgaaagataaggcatatacagtgaaagaacatactgtttgttatgcttaatatgcgtaatctggcctgtctttgtattcactccgaccgttattcaagtagattcttctcggcggaactgcccgatgcctaccctatcttgggtccacatgcgggtagcatgccagtcataccctgactctttcttatgctcactgtacggtgccaagctgctgtcagttgtagagagatatgtgtcatttgtgtgatgagtgagaaaaggatgaagacttgatcagacagcgccacctcgctcatttttac

SEQ ID NO: 52168 - DNA, 67 bp, Glycine max
  Clone ID: LIB3167-023-P1-K1-A7
atgacaggtgggatttttggaaggtttgggcaaaagataaaagggacagttttgtaaattcaaaagg

SEQ ID NO: 52169 - DNA, 377 bp, Glycine max
  Clone ID: LIB3167-023-P1-K1-A8
cccacgcgtccgggcaacagaaacaaaagtggcagtattaggtggcatcaccgaagtgcagggagctgccaacagcgtcgagatcaacaatctcgctcgctttgctgtagaggaacaaaacaaaagagagaattcagttctggagtttgtgagggtgattagtgcacagcagcaagtggtttctggagtgaattactacataacattggaagcaaaagatggtgagattaaaaatgagtataaagcgaaggtttgggagagggaatcccaagagttgctagaattcatgccaacattaggtgcaggaggcgagatcgaccatctcgctcgctttgctgtagaggaacaaaacaaaagagagaatgcaaatcttgagt

SEQ ID NO: 52170 - DNA, 294 bp, Glycine max
  Clone ID: LIB3167-023-P1-K1-B10
atcgagataactagaaacagtgtgatgaaaatgaaggtccttgttttcttcgttgctacaattttggtagcatggcaatgccatgcgtacgatatgttccctcttcgaatgaacactggctatggtgcccgtactccggaggggaaatgcgcaagttggaggcttgctgtggaagcacacaacatctttggctttgagaccattccttgagagtgcgtttgagcaacaaaggaatacattcatggcgaacaatatagatcagactccaaaacagtttaccaacaagcttacttt

SEQ ID NO: 52171 - DNA, 341 bp, Glycine max
  Clone ID: LIB3167-023-P1-K1-B11
cccacgcgtccgcccacgcgtccgaaaaaaactcttatctatgcctatgtctctgtctctgtcaaccgtgcctgcgttcaattctctcacaatggctgaatcctgcctcctatctctcccttccctcttctacgccaaaaacaaaaccctttctctctcaattcccactaatcctctcaacctgcaattcccatgctcaaactcttcgctttttcccctcaccaccaagactacgcgccactcttctctcctcacattcgtggctcagacatctggttgggccaaagaaggggaggaggaagaagccgcgtgggagaaccaaggcgacactgcgtggggaa

SEQ ID NO: 52172 - DNA, 356 bp, Glycine max
  Clone ID: LIB3167-023-P1-K1-B12
cgaagagggtaaagaagagagagaaaacaacgatagctcggaactttcttccaccccagaaaccttcgcagcttcagaaaaagaaaacgacggagcagaggcagaaacagaaccagtaacggtggaaacttcagaagggtcaacggaggaggaagaagagaaagtgatcgaaccgaaggaacaacctcagcaaccaggcccgacccgagaaccaaactcggatccggagtcaatggagcgagaaaacgggtcaaagcgcgaagagagagacagagaagcgttgccggagtgtttggtgctgatgatgtgcgagccgaagctgtcgatggaggtgtctaaggaaacgtgggtgtgca

SEQ ID NO: 52173 - DNA, 223 bp, Glycine max; identical to SEQ ID NO: 49453
  Clone ID: LIB3167-023-P1-K1-B2

SEQ ID NO: 52174 - DNA, 388 bp, Glycine max
  Clone ID: LIB3167-023-P1-K1-B3
cttttctcatagaaagccaccttatactcctcggcttcctcgataattttcagtctcattgcttgctctctattccgttcatagcgttccgcggaacagagaaaaagaaagtaccaatttctttagatagtcatggcttccaccttcgacgccttcaccgtcgacgacgaccacttcgccgcccccgccgccgccgacaccttctctggctaccccgacttctcctccttcccctccgacgacgtccccgtcgattacgccgacaccgcggcgtcgccggagatcttcggattcagcgatcccggtccagtttattcccagtctcccttcgagcaagtgcacgagaatgggaatggaaatggaaccgaaaacggctacggcgacggcg

SEQ ID NO: 52175 - DNA, 385 bp, Glycine max
  Clone ID: LIB3167-023-P1-K1-B4
cccacgcgtccggttcctgcaagcatgaagaacaccttatctggaatttatgcccggggattgattggagcttttcatgattggtgtgaaccattttcaagttaccctcggacatatgatcttctgcatgccaactacctcttttcccactacaaaagaaaaggggaaggttgtttattggaggacatcatgctggagatggatcgactaatacggccattgggatttattatcattagggacgaggaagatattacctctagaatcctagaggtagccccaaaattcctatgggaagtggaatcacaaatgttagagaacaaagagaagaaaatggaaactgttttaatttgtagaaaaaagttttgggctatcgtctaaagtg

SEQ ID NO: 52176 - DNA, 382 bp, Glycine max
  Clone ID: LIB3167-023-P1-K1-B5
gatcaatgccttttatcaggagtgcatgaagttgggcaccactacattaaagctatgccagggcatgcagccaaagttgtccaagttttttgaaccttatgctacgactaacttgcatggagcttctgctgaattgagttctgactccagatctgaagcttgatgctctcggttctatcacggatagacccaagtttcattttttatggcagatagctagtaacattcttcccttttgtttttaaagaaggctgatcacttgggagtgaaagaagtgggtgggttttgatcggaaccctgcattttgcaaatattgcaataagttacaggtgtctcaatcccgcctgcttaacagggattttttttttcttttgggttaaaa

SEQ ID NO: 52177 - DNA, 376 bp, Glycine max
  Clone ID: LIB3167-023-P1-K1-B6
gataactagaaacagtgtgatgaaaatgaaggtccttgttttcttcgttgctaggattttggtagcatggcaatgccatgcgtacgatatgttccctctccgaatgaacactggctatggtgcccgtactccggaggtgaaatgcgcaagttggaggcttgctgtggaagcacacaacatctttggctttgagaccattcctgaagagtgcgttgaagcaacaaaggaatacatccatggcgaacaatatagatcagactccaaaacagttaaccaacaagcttacttttatgccagagacctcgaagtccatcccaaggacacatttgtgttcagtatagatggcaccgtactctctaatattccatactacaaa

SEQ ID NO: 52178 - DNA, 377 bp, Glycine max
  Clone ID: LIB3167-023-P1-K1-B7
gtttcagtttcggatctctctcttctttcacaccaatttccagcatttgaaacatggcagattcaaaatcaggattgaggaaaccagtgttcaccaaggttgatcagctttgcccggggaccagtggtcacactttaactgtgaaggtggtcaatgctaagatggtgatgcagagaggtcgctctgatggtcctcaatctcgtcaaatgcgaattgctgagtgcttggttggtgatgagactggaatgatcatatacaccgccagaaatgatcaagtggatacgatgacagagggagctactgtgatcctgcgtaacgccaaaattgacatgttcaaaggatcaatgaggcttgctgtggacaagtggggccgtgtg

SEQ ID NO: 52179 - DNA, 377 bp, Glycine max
  Clone ID: LIB3167-023-P1-K1-B8
cccacgcgtccgcccacgcgtccgcccacgcgtccgggcttgttcaccaaagaaatagatgaggcactcttgaacagcgaaatcgacatcgctgtccattcgatgaaggatgttcctacttacttgcctgataaaacaattctgccatgtaaccttccgcgagaggatgtcagagatgcatttatatccttgactgcagcttccttagctgatcttccccctgcaagtgttattggtactgcttcgttaagacgaaagtcacagatcctccacagatatccatctcttaatgtgcaggaaaatttccgtggcaatgtccaaacaaggttaagaaaactcaatgagggggttgtccaagctacactattagcattagc

SEQ ID NO: 52180 - DNA, 303 bp, Glycine max
  Clone ID: LIB3167-023-P1-K1-B9
ctgagtccgcgaaacgcgaaggcgtggtgcatgttgggggaaacctacgaagggaacaagatgggagaggaagcgaagaaagcttataaagaggctttggagttggagccacagttgaatgtggctcaagaagcgctcagcaggttgggatcgtcgtaatttggtgttgagtgatgtgagctttaagatgtgatcgatcgctttggttattgtatgtttaatttataactgttgtttctaatcttcgattatggagagtaattgaatgttaagtttgagcaagcaataaaatgattttcgccg

SEQ ID NO: 52181 - DNA, 375 bp, Glycine max
  Clone ID: LIB3167-023-P1-K1-C10
cccacgcgtccggccatgtgtcgcacatgggaagttctagcccgtaagaaaaatgaccttggagaactgccacttccaatggctatttatgttgtttctggagatgaagatggggagcgtggtggagcaccagttgtctgcattgaagatgcctccaaacgctgttttgagttttcaagtggcttagctgcttggacacctctacttttattggttcctttggttcttggacttgataaagtcaatccaaggtatattccattattgcgctcaacttttaaaatttccccaaagccttggcatcatgggtggcaaaccaggtgcttcaacatacattattggtgctcagaatgaaaaagcattctaccttgatcc

SEQ ID NO: 52182 - DNA, 374 bp, Glycine max
  Clone ID: LIB3167-023-P1-K1-C11
tgaaagggaaggaaagatgcagatattcgtgaaaaccctaaccgggaagacaatgacccttgaggtggagtcaagcgacaccattgacaatgtcaaagccaagattcaggacaaagaagggattcctccggatcagcagaggttgatcttcgcggggaaacagctggaggatggccgtaccctcgccgattacaacatccaaaaagagtcaacattgcatcttgttttgaggcttcgtggtggtattattgagccatctttgatggcactggcgaggaaatataaccaggataagatgatctgccgcaagtgctatgcccgtttacacccccgtgctgtgaactgcaggaaaaagaagtgtggtcacagcaacc

SEQ ID NO: 52183 - DNA, 377 bp, Glycine max
  Clone ID: LIB3167-023-P1-K1-C12
cttcgctagctgctcatcaatcctcttcctacatttctcagggggacttgaagcaatgatattaatggagagggacccaaacatgggcaaggaaaaagtgatttcaaattccacatttcttccctcatccacaaaagtgttcaaggacaagggcatctccaacaacagcatgccctcctggcttctcaccaacatttctgacttggaggagagaatgaaagtgttggcaatgagcacaacagaagaagaagaaatgggagacacttttgctgaaagagcagaaacttactaccaaaagaggcctcagctactgtcccttctgcaggacttgtacaatggctacataaccttatctgaccgttacatccaaacactgg

SEQ ID NO: 52184 - DNA, 379 bp, Glycine max
  Clone ID: LIB3167-023-P1-K1-C2
tccaaccaaaaagggacattttgcgggtatttgtgagtgtgtgagagagagagcgagcagtttcagacacagagagaggggtttgggattggagggattgacgctgcgtctcttcctcttctctttcgatccatccctcattcctaatcctccaatccaaccacctcagcctcacactcacatatacacatatctgaacgcgtatcgtccctcctatggcttcaaagcgcatcctcaaggagctcaaggacttgcagaaagacccaccaacttcttgcagcgctggtccagtagctgaggacatgttccattggcaagcaacaataatgggtcctgctgatagtccttatgctggaggtgtattcctagtcactattca

SEQ ID NO: 52185 - DNA, 382 bp, Glycine max
  Clone ID: LIB3167-023-P1-K1-C3
gagattctggcaacatctgaggatagagatggaaagactttcgtttgcacagcacgtggtaggaaatatcccgtgactgtcaacctatggcaaccagagaaaaatgcttttgaatgggctacatctttgaaagcccctcacacagaggatgcaattcgggttactcagtccacagcaaactttttcataagtgaagctaggaaatccacaaacacacctgatgctcaaaaagtgcgagataatctcatctacaattacaaacctacttttggtggaacggctgggaaaggatatgatcaagtgtatctctttgaataattctatctgtaggaggtgtccttgaatttgattttatgcacaataaattatgaactggggatgt

SEQ ID NO: 52186 - DNA, 318 bp, Glycine max
  Clone ID: LIB3167-023-P1-K1-C4
cccaccccttcggttataatagagttagaaagactttcacaggggacatttggggatattaatatacccccactgtcaacctatggcaaccacagaaaaatgcttttgaatgggctacatcattcaaagcccctaacacagaggatgcacttctttatactcacaccacaatatactcattcataattgaagctagtaaatccacaaacacacctgatgctcaaaaagtgccagataatcttatctacaatcacaaacctacttttggtggaacggctgggaacgcatatcatcaattatatctcttcgaataatact

SEQ ID NO: 52187 - DNA, 382 bp, Glycine max
  Clone ID: LIB3167-023-P1-K1-C5
cccacgcgtccgcccacgcgtccgcccacgcgtccgaagagctgtggcgacatcttgaggtcacttctaaggtcaatcctcaattctatgcatttaggtggattactctcctgctgactcaggaattcaattttgctgacagccttcacatttgggacactcttttaagcgatccagatggtcctcaggagactcttcttcgggtatgctgtgcaatgctggttctcgttcgtaagcgcctccttgcgggtgatttcacttctaatctcaagttgctgcaaaattatcccaccacaaacattagtcatttgctctatgttgccaacaagtttcgtgtacagtcagtctaatgttgcattttgctcttctatctctagtttct

SEQ ID NO: 52188 - DNA, 381 bp, Glycine max
  Clone ID: LIB3167-023-P1-K1-C7
aggtgttcagtttaatgctgttgagtttaaaaggtccactgaagaattgaaattgcgttattctaattctaacgaggaagcagttaataaaaccgcaaaaaagaagcggaaatcagaaccctatggcgaggaaccttctggtgaaaatgaagaggaggcagaaatgcgctataggttttatgaaagtgcatctgcaaggaaacgaaccgtgacggcagaagaaagagaaagggcaattaatgcatcaaaaacatttgaaccgactaatcctttctgccgagttgtcctgcgaccctcctatttgtataggggatgcataatgtatctgccttccacctttgctgaaaagaatttgaatggggtttcgggattcatcaaact

SEQ ID NO: 52189 - DNA, 256 bp, Glycine max
  Clone ID: LIB3167-023-P1-K1-C8
cccacgcgtccggtgaccttcagaaataaaatagagactaaaggtaaaaaaaaaagaaaaaaaaaaaaaaaaaaaaaaaaaaaaaaaaaaaaaaaaaaaaaaaaaaaaaaaaaaaaaaaaaacaataaagaaaagaaaaaaaaaggagaaaaaagaaaaaagaagaaaaaataaaaaaggggggggcctgtaagggggttcaaaggtgtaacacgcggggttggcagaagaaagtttttttttaggggaaccaaaa

SEQ ID NO: 52190 - DNA, 379 bp, Glycine max
  Clone ID: LIB3167-023-P1-K1-C9
ggagactagttctgtattcagattacattgcaaaaatggcatcattcaccatgacagcttctatctttggctgcccagctgtcaccaaacggtcggcagtggctgcgcagaggagattactcgtagtgagtgctgccaaagctgaaggggaaaaggtcagttatgacaacaatgatagcaatggaaggaggaacttgatgttcgctgtggctgctgctgctgttttctctgttgctgggatggcagtggcagatgagcctaaaccaggaacctcagaagccaagaaaaagtatgccccggtttgtgtcaccaatcctacagctagcatttgtcgcaattgaggatctcctgtttcattttacctctgatgatcggaaat

SEQ ID NO: 52191 - DNA, 372 bp, Glycine max
  Clone ID: LIB3167-023-P1-K1-D10
catattctggcgagaaaatataaacaactttgaagaaaatgatttccagatcctaagggtcctaataacaattttggacacgtccaatgatccaaggactctggctgttgcttgctatgacctttcacagtttatccagtgccattctgctggacggatcattgtgtcagaccttaaggcaaaagaacgagtgatgaaactaatgaatcatgaaaatgctgaagttactaaaaatgcactgctctgcatccagcggcttttcttaggtgcaaagtatgcaagcttcttgcaggtttaattctgtttctgtggggtggcctagtgtatgcactagattccatcaacttctctgctatctcacaaattggatcg

SEQ ID NO: 52192 - DNA, 314 bp, Glycine max
  Clone ID: LIB3167-023-P1-K1-D11
cccacgcgtccgcccacgcgtccggtaaaaaaaaaaaaaaaaaaaaaaaaaaaaaaaaaaaaaaaaaaaaaaaaaaaaaaaaaaaaaaaaaaaaaaaaaaaaaaaaaaaaaaaaaaaaaaaaaaaaataaaaaaaaataaaaaaataaaaaattattttataataagggggtatttttttttttattgggggttttttttacaatttattggatgtaaaaatttttgtttttaagaaatttaataagtgttgtattaaataattttttttttttggtggaataataaaaaattaggtgttgttttatttttttt

SEQ ID NO: 52193 - DNA, 361 bp, Glycine max
  Clone ID: LIB3167-023-P1-K1-D12
agattctctaaaccctgatcaagttaaggacttggaggctgctatggcaccaaagactttttcacaattgacagacatggagctggatgaatgtgaggaaactacactccatgatgtcaacatggaggaggagactaggaggaagcaggaacaagctcaagaggcatatgacgaggatgatgacatgcctggtggtgcacagagggtacagtgcgcccagcatgcatgacgttgagtggaagctagagtcagaattgatgaacatgatgatctgatgatgattctggcgatgtgccataactgcagtgtgtggctcaaagatcagtagtgtctgatgaaatgattgcgagaaagtgtacag

SEQ ID NO: 52194 - DNA, 235 bp, Glycine max
  Clone ID: LIB3167-023-P1-K1-D2
cccacgcgtccggaaaaattaaaactcacaaagcaatgattgaaattaacaagctgctgaactttgcattgcccccattatcactaattgtcatcttcatcttcacgccacctttgctcttagtgaagctgcttatgtgtgttaaaaagtttctatacaccgaaaacgtggcagggaaagtagtattaatcactggagcagcctcagggattggcgagcaagtagcatatgaata

SEQ ID NO: 52195 - DNA, 387 bp, Glycine max
  Clone ID: LIB3167-023-P1-K1-D3
cccacgcgtccgcccacgcgtccggttttcttcagaaatttgccatcgttgagagaagcgtgagagccttagtcgttcaagatgagagctaagtggaagaagaagcgcatgaggaggttgaagaggaagcgccgaaagatgagacaaagatctaagtaggtgcttgagcaggagttgagatgagctttccatctgctaccagcctcatgacattttaggctgttatggctcttatgatcttgaggtctagtcgctaggggagcttcactcttgacttagtttgctttactggtcctggtcctggtccaagactattgagtgtgggttaagttgtgatgtttagtgttttgtggtatctaattatgtactggtttttatactttttgg

SEQ ID NO: 52196 - DNA, 378 bp, Glycine max
  Clone ID: LIB3167-023-P1-K1-D5
cccacgcgtccgcccacgcgtccgcccacgcgtccgcccacgcgtccgcccacgcgtccgcccacgcgttcgcccacgcgtccgcccacgcgtccggaaacacgaaactcagaatccatggcgacaccagcgacgacgaagcgaaaaccggtgttcgtgaaggtggatcagttaaaacctggcaccaacggccacacactgacggtgaaggtggtcagttccaagccggtgaagacggtgagcacccgcggcggtcgaccgacggtgctagccgcgcgcccgtcgcgcattgccgagtgcctcgtcggcgacgaaaccggaaccataatcttcaccgctcgcaacgaacaggtggaccatatgaatgctggcgcaact

SEQ ID NO: 52197 - DNA, 381 bp, Glycine max
  Clone ID: LIB3167-023-P1-K1-D6
cccacgcgtccgcaaagcgagagcattccattgttgttatattgtattgtagccggagaagaagagaagagatagcggcgaagaaagaaagatgacggaggcatatataaggaagaagcccgggatggcgagcgtgaaggacatgccggttctccaggacggtccaccaccaggcgggttcgctccggtccggttcgcccggcgcatccccaacaagggccccagcgccgttgccatcttcctcactgctttcggcgctttctcttggggcatgtaccaggtcggccagggcaacaagatccgaagggcactgaaggaagaaaagtatgctgcccgccgatccatactgcctgtgctacaggctgaagaggatgagagatt

SEQ ID NO: 52198 - DNA, 382 bp, Glycine max
  Clone ID: LIB3167-023-P1-K1-D7
cccacgcgtccgcccacgcgtccgcccacgcgtccgcccacgcgggcgacccagccgcagcagcaagtgatcgaagcgaaaagagagtaatcagcagagaaattcatcgtcgtagttatgggtaaagttcacggatcacttgcacgtgccggtaaggttagaggccaaaccccaaaagtggccaagcaggataagaagaagaagccacgtggccgcgctcacaagaggatgcagtataatcgccgattcgtcaccgccgtggtgggattcggcaagaagaggggacctaactcgtctgagaagtgaggctgaggcttaaagaatatgtcactactctatatttgatttatctttcttgtctttaatttgtatgttttgattg

SEQ ID NO: 52199 - DNA, 377 bp, Glycine max
  Clone ID: LIB3167-023-P1-K1-D8
ccgtttcgtaactttcggttcctcccattttccggttcaataaattaaattaaaaaaaccgaaccggcggatctcggtggtttcatggaggctcatggcggagggctccgtcgcatccttgtgctcgccttctgcgtcgccggaatctggtccgcgtacatctaccaaggcgttcttcaggaaaatgtgtcgacgaagcgattcaacggtgaaaggttcgagcaccttgcgtttctgaacttggcgcagaatgttgtgtgtttaatctggtcgtttatcatgataaagatgtgggctagtggaaattctggtggtgctccttggtggagttattggagcgctggaattaccaacaccattggtcctgctatgggaat

SEQ ID NO: 52200 - DNA, 250 bp, Glycine max
  Clone ID: LIB3167-023-P1-K1-E1
gttgggcccgggccattaaatcggtgctggtttttctgtggagcaagcttcaaatgttcgttgaacgaaaagtaacacgtactcttaggcactcttaggaaacgaacatttcgttcgtactagcttggtcattattattgtggtgatggttaaagcatggaaggctccttggtcttccctgtcagcctcactagtcctttgtaatctaagtgaaatttctactaattaataaaagttctatatttaagct

SEQ ID NO: 52201 - DNA, 373 bp, Glycine max
  Clone ID: LIB3167-023-P1-K1-E11
gggactcccattccgactcttagccgccgatctctcagggcttgcatcttctcaggtaagctgtgaagatgtacacatcaaggaagaaaatccacaaggataaggatgctgaaccaactgaatttgaagagtcagttggacaggcattgtttgatctggaaaataccaatcaggagcttaaaagtgatctgaaggatttatacataaactcagccgtgcaagttgatgtttctggaaaccgcaaggctgttgttattcatgtcccttacagattaaggaaaggtttccgtaagattcatgttaggcttgtcagggagcttgagaagaagtttagtggcaaggatgtaatcttggttgccacccggaggatttt

SEQ ID NO: 52202 - DNA, 374 bp, Glycine max
  Clone ID: LIB3167-023-P1-K1-E12
cccacgcgtccgagagaatggctcaagcaatggcatcaatggctggcttgcgtggttcctctcaggctgtgttggaaggtagccttcaggtgagtggctccacacgcttgaatgtggggagtggaagcagggtggcctcagtcacacgtgcagggttcacagttagagcacaacaacaacaagtgagtggtgaggtacaaagcagccgtagggcagtgctttcacttgttgctgctggtttggccactggctcttttgttcaagctgtgcttgctgatgccaaatctatcaaagttggaccacctcccccaccttctggtggattgcctggaacgttgaactcagatgaagcaagagaccttcagctgccattg

SEQ ID NO: 52203 - DNA, 382 bp, Glycine max
  Clone ID: LIB3167-023-P1-K1-E2
cccacgcgtccgggggaacttgtcctcgggttttgaacgtgaaccagaggctgatatctttccttctcatgagtggcatagagaaagcagcgagcctatgtatcaggttgttcctcctgacccattaatgagaacttatacagaagaaattccatttaaacattctacttctgctgttggggaaactcaaacctacggtgacaatggaggaaaaccatccatttctcttaaatctgaaaccctatcaactactcccaaagctgcagcatgtgagttaacaagccaagaaagagattctgcattattacggtacaagcagaagaagaaaactaggagatttgacaaacacataaggtatgaatcacgaaaagttcgggcagaa

SEQ ID NO: 52204 - DNA, 385 bp, Glycine max
  Clone ID: LIB3167-023-P1-K1-E3
cccacgcgtccgcccacgcgtccgcccacgcgtccgaaaaatggcagcggcggcggcagtgacggtgctactcccacctaggattccgaccaccaccaacgttacccgctgctctgctttgccttctctccctcctcgcgtctccaacaccaaaaccactttgttctcaccttccctcaacaacttttcagtgtcccgaaaatcttctctgcttcagaccagagcttcttcagaggaatcatcctcagtagatgccaatgaggtgttcacagatttgaaggaaaagtgggatgctcttgaaaacaagtccacagtacttctttatggtggaggggctatagttgctatttggctatcgtcaattcttgtgagcgccatcaactca

SEQ ID NO: 52205 - DNA, 386 bp, Glycine max
  Clone ID: LIB3167-023-P1-K1-E4
cccacgcgtccgcccacgcgtccgcccacgcgtccgggaaaactttggacaaaaaatggagtgctacacaaggccaaacaggagtgacatccacctctcagcagaggaagaagccaccatagaggcaaagaccagagagtactttgatggggtcgcaccacaacgccacacaaagcctcaacgaagtgactattcagctcaatatgtcgatgctttctccaatgcccatcactcttctttaactataccagaattaacacaattccaactcctccagaacgatccccaagagaagaaattggtgtacaatggaagtcaagtaccggaagaatttgtggaaacagagtattaccaagatctcaacagcgtggacaaacaccaccata

SEQ ID NO: 52206 - DNA, 382 bp, Glycine max
  Clone ID: LIB3167-023-P1-K1-E5
cccacgcgtccgcaaagcacaaagcaaagctcatccttgagttaaaaaatggcagcagcttcttccatggctctctcatccccatccttggctggcaaggccgtgaagctgggcccatcagccccagaagtgggaagggtgagcatgaggaagaccgtcaccaagcaggtctcctcaggaagcccatggtacggcccagaccgagtcaagtacttgggcccattctctggcgagcccccgtcctacctaaccggtgagttcccaggcgactacggctgggacactgctgggctttccgcagacccagaaaccttcgccaagaaccgtgaactcgaagtgatccactccaggtgggccatgctcggagccttgggctgcgtct

SEQ ID NO: 52207 - DNA, 316 bp, Glycine max
  unsure at all n locations
  Clone ID: LIB3167-023-P1-K1-E6
cccacgcgtccggtcggcatatcaaacatgatcttgaagattcaaaggaatgaatacatgggatttgataatttttgcaggaatgatacatagagcttttcaagtatctttttatttgcacacattttctgtttgttgtttgccaccaccaaaccacctgagaggggatgatatgttttgtttttatttcaaatgtcaaaaagaaagtttgtgctaattgaagcattttttggatacatatgctaatagaagcattaaatcttgtatgtccaaaanaaaaaaaaaaaaatagaacaaaattgacattaacaaaaac

SEQ ID NO: 52208 - DNA, 342 bp, Glycine max
  Clone ID: LIB3167-023-P1-K1-E7
ctaagcattccaaaaaggaatagcagctgtcctgttggtttgaattttgttcatatggttgagtgctgtgctgtggaagtctgtattatcactatgtagtactgagattttaataatggggaatgttgcttaatgtgaattagaaatgagttaataagacaagtgaagttcattactaggtttcaaaaaaaaaaaaaaaaaaaaaaaaaaaaaaaaaaaaaagaaataaaacaaaaaaaaaaaaaaaaaacaaaaaaaaaaaaataaaaaaaatataaagataaaaaaaaagaaaaaaaaaaataaaaaattatggggggggccgttttaagggatccaagt

SEQ ID NO: 52209 - DNA, 378 bp, Glycine max
  Clone ID: LIB3167-023-P1-K1-E8
gaagtggaagccaaaagaaacagaaaaaagggtaagcaaatgaaaccaccgctaccacttttttcattgctccggcatttcctcctcctatcaccaccaccatttgaagcaaaagagaggctatgctgaaaagggtctgtgtggaaacctttgacatgatgatgacaagtgttgttgtgtcccatgaaagtggtaagtaagtgggacttggaacaaacaatggcaaagcaaaagaaagaaaagaaagtaagacacaaacaggttccacttgcacactctcttttttggtttctcacttctcaaactcagatactcagatgatagtggtagtatagtacaatgaagaacaaagggaaggatctaaataacacaagaagg

SEQ ID NO: 52210 - DNA, 361 bp, Glycine max
  Clone ID: LIB3167-023-P1-K1-E9
ctggaattgaaggaaaaatcaatgcaaggaacagtgatccaagtctgagaaaccggactgggccagttcagctgccatacactttgctccatcgttcaagtgaggaagggttgactttcaaaggaattcccaacagtatctctatctaattaaaaagagtttgtggtttccttatctatgttgtacttctgaataacatagactttatgcatgtctatgcgtaattattgcctgaacttctgcactattgtatttggatgctctcggttttcatataataaagtgtgttctcactttcactttgtatttagttcatcttatgtttaccagtaataatacagaagcgatcgcgtttattact

SEQ ID NO: 52211 - DNA, 371 bp, Glycine max
  Clone ID: LIB3167-023-P1-K1-F10
atatagatagatatctatttgaattgcttcattcgcgaggagccgtatgaggtgaaaatctcatgtacggttctgtaataaagatggaattgagaaacaaccatcaattataacccccaaagaaccagatttcgtaaacaacatagaggaagaatgaaaggaatatcctatcgagggaatcatatttgcttcggaagatatgctcttcaagcacttgagccagcttggataacatctagacaaatagaagcgggacggcgggcaatgtcacgaaatgttcgccgaggtggacaaatatgggtacgcatatttccagacaaaccggttacagtaagacctactgaaacacgtatgggttcaggaaaaggttc

SEQ ID NO: 52212 - DNA, 376 bp, Glycine max
  Clone ID: LIB3167-023-P1-K1-F11
ggtttgtcttgtttgagattggagagaaaattgaattgcgtgagtgaaagttacatcaaccccttacgcgcaaaccaattccaattccctttgcaagcaagcaatctcagatagctgattcacacaatccctttctctgctgctaattggaatcggcatggtccaaccggcgccggcgatgactcagttcctcaactccgtcctctcccagcgcggcccctccgccgtcccctactccgaggacaccaagtggctgatccgccagcacctcgtggccctcaccaccgccttcccttccctcgagcccaaaacggcgtcgttcactcacaacgacggccgttccgtcaaccttctccaggccgacggcaccatcccc

SEQ ID NO: 52213 - DNA, 376 bp, Glycine max
  Clone ID: LIB3167-023-P1-K1-F12
gatccccatcacaacgcatcatggttagcaccaagcctaaccagcttgtttgcaaggcacagaagcaagaggatattgatgtcagcccaatctctcgccggttagctctaaccgtgctcattggtgctgctgctgttggctccaaagtccaacctgctgatgcagcttatggggaagctgccaatgtgtttggaaagccaaagacagacacagatttcctgccatacaatggagatggattcaaactatcgattccctcaaagtggaacccaagcaaagaggttgagtacacaggtcaggttgttagatatgaggataactttgattcaaccaccaacgtggttgtcaccatcactccgactgataagaagtctat

SEQ ID NO: 52214 - DNA, 376 bp, Glycine max
  Clone ID: LIB3167-023-P1-K1-F3
cccacgcgtccgccccaactgaacatctatttttgtaaatggatctgcggtatatctgatgtaagttttatttcttattcaactctaatcttacctaaccaaaatttaaatcttgtgctataatgcaggtcacaacaattgattgaaaattttgagtccctagataaataaggcatctaaatctcaattttggccagtggagagtgatgaataaggacatctaagcgtgtctttttcctttaacatgctcttaaattccaccccactcgatttcaatgagatttgaaacctccataattgaccatgcaacctggtctgattgaatcatacatactgtaacattatgctactccaatgtgtacgtttagaatgatct

SEQ ID NO: 52215 - DNA, 380 bp, Glycine max
  Clone ID: LIB3167-023-P1-K1-F4
ggaaaaggcacagtctggggaaaagctccttcaaagatagaggccacatatactactacttctggggaaactaaaagaagccttcttttaacctctggatggtggggattatctcgtcactttcattatgtccctgaaatactggcagctttcttctggacagtcccagctcttttcgaacattttttgccttacttctacgtgatatttcttaccatccttctctttgatcgagcaaaacgagatgatgatcgttgcagatccaagtatggcaagtactggaaactatattgcgacaaggtaccttacagaatcattccaggaatatactgaagaatgattatcgaaaacggcttatctggagtcccccaacttaaaat

SEQ ID NO: 52216 - DNA, 386 bp, Glycine max
  Clone ID: LIB3167-023-P1-K1-F5
gaaaaaatggcaacaaatattctctcaacctcaaaccccttcctactaactaattcattctcatcatcatcatttgtaacaccaacatatgtttactacaatcccataatgaaatgcacagtgaagagggaattaactctttgcaaagcagcaaaccaaccagcccctccacactctccaattgttgtgacaaagagaggcttgtccatcagcttcatcaccagcttcgtgctttcattggctagtaagaagaatgcaaatgcagcaatacttgaggctgatgatgatgaagaactcttggagaaagtaaagcgtgacagaaagaagagacttgagaagcaaggtgtgatcagttcttccaaacaagaaacagggtatcttcaaga

SEQ ID NO: 52217 - DNA, 383 bp, Glycine max
  Clone ID: LIB3167-023-P1-K1-F6
atccctctgtgctaattagagtgtattatttttggacctatgtgtcgccctctccatgttccccactttctttattatgaaccgaatttcctcatcactagtacttctacatcaccatggctgaaactccatcaccctctgagtctcccacagtctactttggccccatcataagtaatggccaagttggtggcttcgattggattgtccttgtggcagcaattttatgtgcctatgtgtgtgctcttggcctcaacacaacggtacaatgtgtgtttcaatgtgcttgtcgtgtcctcacagagcctcgccaatggattgcttcacgaaggctcaactctggcctcaagaaaaaggaaatggtggctttgccaacctcaact

SEQ ID NO: 52218 - DNA, 377 bp, Glycine max
  Clone ID: LIB3167-023-P1-K1-F7
cccacgcgtccgctaaataatggcgactacgaatccctttgatttgttgggcgacgacgccgaggacccctcacagttgatcgcggcggagcaactgaaggccgcggcagccgcggccaccgcgccacccaagaaggaccaggccaagcccggagctcgcagcggcgcgccggcccagttgccgtcgaagccgcttcctccctctcaggctgtaagggaggctaaaaatgaaacttcttacggcggtcgtggtggtggccgaggaggtggaagaggatttggacgcggccgtggtggcggcggtggctttggccgtgatttttccaatgatgataactcatcggcccctgctaaccaaggatcttttgaaggagatt

SEQ ID NO: 52219 - DNA, 343 bp, Glycine max
  Clone ID: LIB3167-023-P1-K1-F8
cccacgcgtccggttcctccgctcaacaactataataacatctttctctctccgaacagatcacactatggccacctcaagcgccaaatcagtccatgatttcaccgttaaagatgccaagggaaatgatattaatcttggtgactacaaaggaaaggtccttatcattgtcaatgttgcctcacaatgtggcttgactaattcaaattacactgagctcagtcagttgtatgagaaatacaaacagaaaggtctggaaattctggcatttccatgcaatcagtttggggcacaggagcctggatctaatgaacagatacaagagtttgtttgtactcgcttc

SEQ ID NO: 52220 - DNA, 375 bp, Glycine max
  Clone ID: LIB3167-023-P1-K1-F9
gtggtttcagtgagtgatcggtgttcacttgatccttcataagtcgtcatcatcatcatcatcatcaccgttgattgaagaagatgccgatcagaaacatcgccatcggaaggcctgaagaggctactcaccccgacacgttgaaggcggggttggctgagttcatctccaccttgatcttcgtgttcgccggttcaggttccggcatcgcctacaacaagctcaccgacaacggcgccgccactcccgccggcctcatctccgcttccatcgcccatgctttcgccctcttcgtcgccgtctccgtcggcgccaacatctccggcggccacgtcaaccccgccgtcaccttcggcgccttcgtgggcggcaaca

SEQ ID NO: 52221 - DNA, 349 bp, Glycine max
  Clone ID: LIB3167-023-P1-K1-G10
aaacattctaaaacaaaggacccagttttacatttttttttgttcctgagttccaatggctcttcaggctgcttccttggtttctgcttctttttctattgctaaagagggaaagtctggtgtatctctcagggacaccacaatgtttggtgtttcattgtcggatactctcaaatctgacttcagctctccctcatcgacttgcaaaagggaattccaacaaaaatttggccctttgagggttcagtcagtggcaacaacaactccaggagtcaccaaggcttcaccagaaggcaagaaaactttgaggaaaggcagtgttattatcactggggcttcctctggatta

SEQ ID NO: 52222 - DNA, 377 bp, Glycine max
  Clone ID: LIB3167-023-P1-K1-G11
cccacgcgtccggtccaagcagcctccaattcgtgccactctcttcaaaatggccgttaccttctcaaatctccacacagaatcaggtctcaagtccctcgacgacttcctctctgggaaggtctacgtttctggggatcagttcacaaaggacgacatcaaagtgtatggtgctgttttggagaagccaggtgactcttttcccaatgctgccaagtggtacgaggttgtctcatctcagcttgctgcaagcttccccggcaatgctcaaggggtgagattcagtggcaaagcttctgctccagcggaggctgctcctgcgaaaccggatgcttctgctgctgaagatgatgatgaccttgatctctttggcgatg

SEQ ID NO: 52223 - DNA, 190 bp, Glycine max; identical to SEQ ID NO: 49506
  Clone ID: LIB3167-023-P1-K1-G12

SEQ ID NO: 52224 - DNA, 381 bp, Glycine max
  Clone ID: LIB3167-023-P1-K1-G2
cccacgcgtccgcttgcactaattaggctactctcaatttcttctccttcactctcagagaactcatatggccgccacactcactcttctaaagcttccaatccttcctaacaagccattactgccacgcccatcaacctcaaaactttttccacttccttccatctattcaaaattaaatatcccaaaagattatattgtttctcctaacaacatcgatgctctcaagcctgcctttctttccctctcggcaatcacatttccattgttattagaaaccaaggatgcacttgctgttggtggagagtttgggatattggaaggaagatcatttgctctcatacaccccattgtgatgggttcttttttcttgtatacatt

SEQ ID NO: 52225 - DNA, 376 bp, Glycine max
  Clone ID: LIB3167-023-P1-K1-G3
cccacgcgtccgattccacataataatattacgcctcccctcatgtgtatatataatatatatagttcagttgagtgggtgtgtgagtgaaagaccacaaacaacaaggttggttcaacttgtgtgaagggattggaacatggaaaatcttggtggttctagtcgtaggaaagcaattgaggagcttcttagagggcgtgattctgcccaacaacttaagagtgtcatcaatgggacttatgatgatggatcagccaccccatttgctcaacaacttgtgaaagaggtgctcatgtccttcacaaactccctcttgttcttgcacaacaaccccacttctgaatcacatcatgtcttcaatgttcaagtatgggac

SEQ ID NO: 52226 - DNA, 298 bp, Glycine max
  Clone ID: LIB3167-023-P1-K1-G4
ctactaccttatgcattagctggcgtacggtcgcagctactgggatgcttatgcgagtactaaggtggaacctactcactcactctgtctaacactctccaaccacgcgagcgtttctggcgtgcaacctgagtctgccaccgtatccatcataaccaacctttttttattacaaaaccctgatttcgtcgcggggaacactctcttactgaggatgcagagagttcgctcagcaagtggctgaagtgagaacaaagcacttgtcgtaaggccgcagcgctatggagcgatcacatca

SEQ ID NO: 52227 - DNA, 338 bp, Glycine max
  Clone ID: LIB3167-023-P1-K1-G5
ctttttacttcccctatggctcgtcactccttgctcttagccctcctcctcttcgccgccgtggccaccgccgcgatggcggtggccgcgtccgacgccgacgacatcctgatccgtcaggtggtgccagatgttggcgaagccgaagaggaggacaacctgctgaacgccgagcaccacttcgcgagcttcaaggccaagttcgccaagacctacgccaccaaggaggagcacgatcatcgcttcggcgtcttcaagtccaacctccgcagagccaggctgcacgccaagctcgacccctccgccgtccacggcgtcaccaaattctccgatctaac

SEQ ID NO: 52228 - DNA, 387 bp, Glycine max
  Clone ID: LIB3167-023-P1-K1-G6
ctcattactctctctttgcagagaagagagaaatgtcggtgagttccagctccaggggaagaataacgacggagcttcaagtccccaagaaatggacagagagagaaacaagtcctgagagaaccaaggtttgggccgagcccaagcccaagcccaaaacgcccagaaaagtttccgtcgtttactacctctcccgaaacggccaactcgagcaccctcacttcatggaggttcctctctcttcgcctcacggactctacctcaaagacgttatcaaccgcttgaacgctctccgagggaagggcatggccaccttgtactcctggtccgctaaacggagctacaaaaacggcttcgtttggcatgacttgtcggagaacgatttca

SEQ ID NO: 52229 - DNA, 243 bp, Glycine max
  Clone ID: LIB3167-023-P1-K1-G7
cataagcgtacgtgtgagagagggtttagaaatgggaacactagtgggctgttgcagaactacataaatcactggggcaggacatgtgcttaaacgacccggtgggggctcatgctgtaccgatctcgattgctatcatgacatgatcatgagtgggagtactgtcctaagaagcgtgagagaggagctacattgaggaaatgcacttaagcaaggcaaacctcgggatgggtgcatctttgt

SEQ ID NO: 52230 - DNA, 376 bp, Glycine max
  Clone ID: LIB3167-023-P1-K1-G8
gtcgacctcttccattaacgggtggtgcctctcttccatctccccagccaaaacctctctcaagaaggccacattaggcccttctgtcttcgcaaccgttagcactccttcttctccttcttcttcttcttcttcttccttcccttctctcattcaagacaggcctgtctttgctgcccctgcccccatcatcaccccaactgtgagagaggatatggcaaaggaatacgagcaagctattgaagaactccagaaattgttgagggagaagagtgaactcaaagccacagctgctgagaaagtggagcagataacagcttctctgggaacatcatcatctgatggcatcccatcatcagaagcctcagacaggatc

SEQ ID NO: 52231 - DNA, 377 bp, Glycine max
  Clone ID: LIB3167-023-P1-K1-G9
ggcaagagacagaaagaaggacacggttcgaggttagggtttgagtctcaaccactctttctttaaagcacagtctcacatacctcattgcctttgctttgttctctctctctctctctctctcttttctctgtgtgtgtgcgtggattggtgaatttgagattgaagaagatgatgcaggctggacccggcggcatggcccaacaagcgaaccagcaatacgcacagcaacagcaacaacaacaacaacaagcctacatgatgatgccgccgcagcctcagccccctcagatgtgggccccatcggcccagcctccgtcccaatcggtagctcctccgcaacccaccagcgccgatgaggtccgtaccctctggat

SEQ ID NO: 52232 - DNA, 167 bp, Glycine max
  Clone ID: LIB3167-023-P1-K1-H1
tcttttacatttctattataggcgtgattcagttcagtcgtcactgattggcgaacagtcactcgttgtataccgacgggactcaaaacgcttgggacacggccacgcgacttacatattacaccagtggtggctaatacactgatggacatgacctctttctcacc

SEQ ID NO: 52233 - DNA, 376 bp, Glycine max
  Clone ID: LIB3167-023-P1-K1-H10
gcattctgtaatctgcagcaccgtcgtttcactttcaccatacgactcttgtcgccggaaccctaaccgattgcgcgccaaatcctctctgctcgttcagaaacaggacgcccaactctccgactccgactccgactccgtctccgtctcgcgccgcctcattctccttcgccatgctaagagttcctgggataatcgctctctccgcgaccatgaccggccactgagcaagtctgggaaagaggatgctgtgagagtttcccgcaggctccaacagttgggttggattcctgaacttatcttgtccagtgatgcagcgcggactaaggagacgcttaagataatgcaggagcaagtgcaggagctggtggaagcc

SEQ ID NO: 52234 - DNA, 382 bp, Glycine max
  Clone ID: LIB3167-023-P1-K1-H11
cccacgcgtccggaacaaccagctacccaggttactaccaccgaagaaccaaaggaagaaaccaccaaagaagcaaaagaggaagaagaagccccagttgagactaatgaggcaacagaagtgacagaggaagtgaagcctgaggtagaagagaacccagcacctgagagaacagaagaagaagaagtgaaagaggaaactaaagaaaccgaatcagcaccagtggaggaacagaagcaagaggagaacaaaccagctgaaaccgttgaggaaaccaaaacagaacaagtttctgttgagaagactgaagcttaagcccatggatacggtattattgaagtagatgaagtttcttgcatttttattttatttattattaatg

SEQ ID NO: 52235 - DNA, 382 bp, Glycine max
  Clone ID: LIB3167-023-P1-K1-H12
tcgaccacgcgtacgcttgttttgtcatctaagaaaacctattgagagtaagcacacattgatcagcaacaatggcaggctactcaagccatgctttgaaaaccatccctttttctttctttgtgaagcctgtcagtaccaaaccaacatcattcttcacaccttcacctaccaaacctttcttacccttcacctgaccaaaccactctctcaccaaaaatctgaagctgaactccactttgccacacttttgcttgtcttcagttcccaagaaatctttcacttgtagaagccaggctgagcctgttgactcacaaaaagtccaagaactgagtgtgtatgagatcaacgagcgtgaccgtggaagccccgtttatcttcg

SEQ ID NO: 52236 - DNA, 383 bp, Glycine max
  Clone ID: LIB3167-023-P1-K1-H2
cacggagtcacactaccactagtttttttgttcctagcgcttgtttatgtttgggggcagatttccctgactgcgcaacctcgtttcgtttccatggcttcaacacttcagaaactgcttcgaaaaccatcacctctaccacccttcagattcatcactgccctcaacccaccgcaaccccaaaaccaaaaccaaaaccccatcctcactctcactcgcgacccttcccaacaatgtaacgctcaacccttcgatgatgcccccaccgtgatctttcccagtttcccctttggcttcttcccaagacccgtttctgaaagcgggtttcgtggcggcgatgatgccggggtggaagaagaagactctggaaccctctgggcgga

SEQ ID NO: 52237 - DNA, 384 bp, Glycine max
  Clone ID: LIB3167-023-P1-K1-H3
gcgagcggccgctcgcgatctagatctaggcagcaagttgttgaaaatgcatcacttaaaatattgaaagttgaagagaaactatcgaaaggatggggtggagataatgcttatcacgttagtgggtaccgctacttacttgtagatggtgatagaaatgtatccagggcttctccagcaacaaaagttacaactttaacaaaggagtccttacttgctatgaataagcttaggcaagaggtggagttagagaagagtagagcaaaactggatagccgtaattgtgaaaaagacttagaggtgtgcattagagcaaaaaataatgcatgggttatttctcgagtcacaagagggaaggagctttacatggttctagagaaagct

SEQ ID NO: 52238 - DNA, 384 bp, Glycine max
  Clone ID: LIB3167-023-P1-K1-H4
agctgagaaaacaggtttaaatcacctctgaatttctgctatggcttcaaccagatcagtctttgttcttcttttcattcaattgtgcttctcacttctacccttgtcattcgctcaatcccccgccaccgggtctaccgaaggttacaccatttatggtcgagtgaagatccccagtgtgggaacaaaagattatattcttcctggaaaaatttcaaatgtcaaagtcatactcaatggtggtcaaagagttacttttctgaggcctgatggatatttctcattccacaatgttcctgcagggacacatctaattgaagtggctgccataggctatttcttttctccggtacgagttgatgtaagtgccagacaccatggcaa

SEQ ID NO: 52239 - DNA, 390 bp, Glycine max
  unsure at all n locations
  Clone ID: LIB3167-023-P1-K1-H5
aacnatgtcgcctagtttcgtcttcgacccgctagcgacgaagaaatcgaacactctgaacacgaagaagaagaagaatccgaagaagaaccagagtcaggatcaggaacaggatcagaatcagagtcagaaggagaaggagaagaagaagaagggcacgaagaagcgcgggttccgaagaagaagaagaagaaaacgcagtctccatgggactttgctaaatacacggaatcagtggcggaggaacacgctcgcaggagcacaacctcggtcgacgagaaaatctccaaagcactcaaacaacgttccacgccgctcgttgctgagcttgaccacagctccgagtccgaacctgatgaacaagaagattatagaccagaggaagaagat

SEQ ID NO: 52240 - DNA, 385 bp, Glycine max
  Clone ID: LIB3167-023-P1-K1-H6
ctccttgtttcttacttgtgtatgaaaaaaaaggagacgaaaaggaaaaaacagaagaacagtgttcgaagatggagaaaatgatgcgactgagaccattgttccgatcactgagttgcagatcttatcatttcgttcttcgtccttctcttctctctcgctctcccaatcctcttccttctccttcaccctcagaatgcaggtctcctctctcaatgggtttagggagtatgagattctatagtgaagatgtgacccacatgcccaatattaaggaccctgtgctttacaatgctttcaaggatttgatggcggtaagttggagtgagcttccggattctgtcatatctgatgttaagaatgcactgtctaaaaacactgatga

SEQ ID NO: 52241 - DNA, 376 bp, Glycine max
  Clone ID: LIB3167-023-P1-K1-H7
acaatttctctctcctctctctctctacaaatccttctttctttcttctcttcgctgctcactgtagccatggctttcagagtaggaggagcgggagggggaaatgcctcttctggcatgggtgttgctgagcatagtgtaaacaccttcctggaattgcagaggaagaaagttcatcgctatgtgatttttaaaattgatgagaaaaagaaagaggttatcgttgaaaaaactggaggccctgctgagagctatgatgatttcactgcatccttgcctgaaaatgattgccgatacgctgtctttgactttgattttgtgacatctgagaactgccaaaagagcaaaatcttttttattgcatggtctccttcag

SEQ ID NO: 52242 - DNA, 375 bp, Glycine max
  Clone ID: LIB3167-023-P1-K1-H9
aaccaaggagcttggaactgttatgcgttcattggggcaaaacccaactgaggcagagctccaggacatgatcaatgaagtggatgctgatgggaatggtaccattgacttccctgagttcctaaatctcatggccaggaagatgaaggacactgattctgaggaggagctgaaagaggcattccgggttttcgacaaggaccagaatgggttcatctctgctgctgagctccgccatgtgatgaccaacctcggggagaagctcaccgatgaagaggttgatgagatgattcgcgaggccgatgttgatggcgatggccaaataaactacgaggagttcgttaaggtgatgatggccaagtgatcatcacatta

SEQ ID NO: 52243 - DNA, 274 bp, Glycine max
  Clone ID: LIB3167-024-P1-K1-A1
acgcccacgcgtacggcgaagcaaggtccaatatagttttttgtgtacgcgacagccactgcgcaacagttggatgttgagttcggatcccaacatcgttatagagaaaataggagagcttgaggtacacacatcagatggcatcacaggagaagaatcatgggtgccaggagaacgtgtatcttaggcactctcgcttctataatgctaatgggcattggcgcctactttagactctggactattcactacaacctttattccgaagacaccc

SEQ ID NO: 52244 - DNA, 408 bp, Glycine max
  Clone ID: LIB3167-024-P1-K1-A10
cccacgcgtccggtttgttgtgagctataagctagtttatcgtgaggagaatatgaagttgtttgttttctttgttgctgcagtagttttggtagcatggccatgccatggcgcaggctaccaaaggttccctctccgaatgaaaactggctatggtgagcgttcttcggaggtaaaatgcgcaagttttaggcttgctgtggaagcacacaacatccgagcctttaaaaccattcctgaagagtgcgttgaaccaacaaaggactacattaatggcgaacaatttagatcagactctaaaacagttaaccaacaagctttcttttatgctagtgaacgcgaagtccatcacaacgacatatttatattcggcatagataacaccgtactctctaatatcccatacta

SEQ ID NO: 52245 - DNA, 405 bp, Glycine max
  Clone ID: LIB3167-024-P1-K1-A11
caaattttcaatttctcagcctcttttcctgtttcttcgtttctttctgaatatttaaatttttcgttttaaatcctcagcattgaaaccaaaaactgatcttcgaatagcatcgcaaagactcaaaaccaccccaaaataacaagaaaatccaattttttaggctctcacaaaaacgggtggagaaaaaaaaaacttgaacactgaacctacgttgaagctgaaagtggttgaaagggggttatggagagttccgttgggggagagaggagtggacgcgtggcactatcagaggtggtggcagattgtgtgaaacggtggttcagagatgcactgaaagaggccaaggcaggggacataaacatgcaagtgttggtgggtcagatgtacaacagtggctatggg

SEQ ID NO: 52246 - DNA, 401 bp, Glycine max
  Clone ID: LIB3167-024-P1-K1-A12
ccacaaccgaggcagtcttttattttatatagtataattcattctgtcatatatatctgtgtgtgtaacaatggtggtctttatttgcaaggaagaatatggtgttcccttgagcaatggctgggctgcaacacatgaatttggccacaagttttgcatctcaaatgaaggtgatgatgacgatgatgataatggcgtcatcgatgtggccccagctgcatagaagaatttggcagaaaaacatgcatagatgaggaggagggatatagtagctagcttagtagtcactgtaagcttcattctgtcgtcttgcttagttacatttgtgtttactcttggaatatataggttatagtgttatgcttgtgtgacataatagaatttatattagtaattatggc

SEQ ID NO: 52247 - DNA, 351 bp, Glycine max
  Clone ID: LIB3167-024-P1-K1-A2
actttcgatcagggtttccactcgtctccgggctcgtttcgttctcgaataatcgagctacgataatgactcgcggtagccagagggatcgtgatcgcaaaagggctcaggctagaactggtgctaaaggcaagcagaaagatgatggattgacccctgaacagcgcagggaaagagatgcaaaggcgctgcatgagaaggccgcatagaaagcggcacagggtgcaggagggaataatgcagctggaagcaaaaaataggcaataattcaatgagtcgtttgagtgtgccgtttgttgatggaggacatggaattcgtggaaactttatgttgcattattcatggaggat

SEQ ID NO: 52248 - DNA, 327 bp, Glycine max
  Clone ID: LIB3167-024-P1-K1-A3
acgctgctacacaatggattagtgtttacaacgcttgtcggccaatgaagcaaaggtatcattataatgctgctgatgcgcggctggcccaacacattgataaaggaaatgaagatggttcatttatcagcagtgtgggttcttgttctaatctttgggcactcattatggatgctggcactgggttcacagcacacgtttatgaactgtctcccttcttgcttcacaaggaatgggttatggtacagtgggagaagaattattacatgagtgccatagccgggggctataatgggacctcattggttgtaatgcataaaggtaccc

SEQ ID NO: 52249 - DNA, 406 bp, Glycine max
  Clone ID: LIB3167-024-P1-K1-A4
ccattctccggcggctcgatgaacccagcacgctccttcgggcctgcagttgttagtggtgacttccatgacaactggatctactgggttggacctctcattggtggtggtttggctggccttatctatggcaatgtcttcattcgctctgaccatgcacctctttccagtgagaggtccaacccagcacgctccttcgggcctgcagttgttagtggtgacttccatgacaactggatctactgggttggacctctcattggtggtggtttggctggccttatctatggcaatgtcttcattcgctctgaccatgcacctctttccagtgaattttgatttggttcaagtcatggcatgtgtaattcatgtttcttgatgataaaaggaggaaaaagcagttctt

SEQ ID NO: 52250 - DNA, 210 bp, Glycine max
  Clone ID: LIB3167-024-P1-K1-A5
tgatgatcttggaggaactttctgtgagaccgagtatcagaagggtgtctactagagaaatgtgaaaaccctttttattgccatgactactgcgttttcaatgtcaaccagtagtaattgtagtgttgaatgtacataggtataaggctatggatctcagtttatattgagtttcagtatcgctataaaactttacaataattatacact

SEQ ID NO: 52251 - DNA, 374 bp, Glycine max
  Clone ID: LIB3167-024-P1-K1-A6
cactgtggatggaacacaataatcgaaagtgttaatgctggtttgccaatggctacttggcctctgtttgctgagcagttttacaatgagaagttgctggctgaggtgctgagaattggggtgccagtgggggcaaaggaatggaggaattggaatgagtttggagatgaggtggtaaaaagggaagagataggaaatgcaattggtgttttgatgggtggtgaagagtctatagaaatgaggagaagagcaaaagcacttagtgatgctgctaagaaagctattcaggttggagggtcttctcacaacaatttgaaagaactgatccaggagttgaagtcactcaaactgcagaaggccaaccacaaaagtta

SEQ ID NO: 52252 - DNA, 241 bp, Glycine max
  Clone ID: LIB3167-024-P1-K1-A7
gccacgcgtccggccacgcgttcgattactcgtgcgtccacgcgtccgggagcatacagggaatttacgagagaaaaagatgggtttcataatggaattcgcggagaacttggtcttgaagttgatggaggacccgaaggaaagggatcggaggttccgggagcacgtttatagagtgaaggacaggtgcgagaagacgaacgagatgtggagctaccctatgcgaccctatgggttttgg

SEQ ID NO: 52253 - DNA, 119 bp, Glycine max
  Clone ID: LIB3167-024-P1-K1-A8
acgtgtttggatagggttcgcccttatatacgggctcgtttcattctcgcatggtcgggctccaccttgccccccgggaacccaagggtttcgggaccgcgaaagggctcaggggggga

SEQ ID NO: 52254 - DNA, 312 bp, Glycine max
  Clone ID: LIB3167-024-P1-K1-B1
acggaggctttgagcagcctttctactcgcactcaagtcattgcaagggcaatgcagacaacattgcgcagacgaggaggtggaattacttgcactaatgaatgcattgtagctgagcaaagagcaagaagtgcgttgcctcgagcactgatgtgcaaagacgcagggcacactcagcaagctagacgtaattgggttccgtggacaatcgtcgatccacacgtctggaaaaaaatactggcccatcatgcacgtattgcgacggtcaagctccgtggtggtgggctcgtccgttgaaattgccaaggccgt

SEQ ID NO: 52255 - DNA, 367 bp, Glycine max
  Clone ID: LIB3167-024-P1-K1-B10
cccacgcgtccgcaaaaaaacagtaatcataacttgatttagatctcaaaaatcttgatcatcaccatcattacctttagatctttctcccttttgctcactatcactctcagtctctcacctatccacccaacatgccttctagggtttccattctctgtgtcactgggacaatacaacagtcccaattctcaccctttcacaccaccattctctgattcaccctccaccctcatatccaccaaaaaaggcatgcatctttggtgccactgcctcaaacccacttcagattctcctctgaaacccactgagggtgttgttggcggtgtctcttagtgttcattggtgttcactggtcaatttgggg

SEQ ID NO: 52256 - DNA, 232 bp, Glycine max
  Clone ID: LIB3167-024-P1-K1-B11
gttattccccagtcaaaatggtatgatttttgtcgtgtctttttcgtgttgtgtccttggtttctatcctattttctgttatagtgagttcttagctagctgttttgggatcgtagacgctgaaacttaaaaatgcttgattttggtacacattatcttttatgactatagcaagaccagtgtacaaatacatttctccgtggatgtgtatgaatttcaatatgctcacgat

SEQ ID NO: 52257 - DNA, 405 bp, Glycine max
  unsure at all n locations
  Clone ID: LIB3167-024-P1-K1-B2
cccacgcgtccgagcaaaagcaagaagaactagtctaagcagaaatggcctcttcagtgatggcatctgtggccctcaaacctgcccctttcactgttgagaagtcctcagttagaggccttccctccctctcaaggaactcctcttcattcagagttgtggccagtggtggcaagaagatcaagactgacaagccttatggaattaatggtggcatggctttgagggaaggagttgatgcatctggcaggaaaggaaagggaaagggcgtttaccagtttgtagacaaatacggtgctaatgtcgatggttacagttctatctacgacaccaaggactggtctccaaccggtgatgtctacgctggcggtacgactggcttggctatctnggctgtgactctac

SEQ ID NO: 52258 - DNA, 408 bp, Glycine max
  Clone ID: LIB3167-024-P1-K1-B3
cccacgcgttcgggaaacgaaggacgacagtgctgaaaaagaagaagcttggtcttgtcatgaagacgaaattcttttgaactatgttcaagtccgtggagaaggaaattggagaaaccttcctaaaagagctggcttgaaacgatgtggtgagagttgcaaacaacgatggttgaactatcttaagccaaccatatctagaggaaacatttctttagatgaacatgaactcataatcagactgcataagctcttggggaatagatggtctatcattgctggacgattaccaggacgcaccgaaggagagatcaagaactactggaatacctatttgagaaaggaggcagaagaggaccaaaacaattagaacgaattttcaagcacaagtatgacaacaactagcat

SEQ ID NO: 52259 - DNA, 338 bp, Glycine max
  Clone ID: LIB3167-024-P1-K1-B5
gatgatgggagtgggggaacattgagtggggctgtgagagtcaaggtaaggaatttggttcaagagagtatgccctcttttgctatgtgaaatcaaagtcaccattttcatttgatttcatcaatcaatcatagtttgtgcttcttttgatttcatgtacgcacgcatcaatttaatggggactttatatttagttgcgaaatttcactagaatttattttgcccatttacatgccaaacgcaagagcactgctattggaaaaatattgttcatactctgcattatgcaaaatgcaacactaatactttgcaattctatgcaaattacaattcgctat

SEQ ID NO: 52260 - DNA, 408 bp, Glycine max
  Clone ID: LIB3167-024-P1-K1-B6
ctgctctttgtcttctctgacacatttggggccttgttgagggtgtttttgcaagagggtatggcgaaggacgttgaggttgctgagcgtggctccttctctgggaaggactaccaggaccctccaccagcaccactcattgatgctgaggagctcacaaagtggtccttttacagggctcttattgctgagttcattgccactttgctcttcctctacattactgtgctcacagttatagggtacaagcaccagacggatcatgctgatgcgtgtggtggggttggcattcttggcattgcatgggcctttggtggcatgatcttcatccttgtctactgcactgctgggatttcaggaggtcacattaacccagcagtgacatttgtggctgttttggctcgcaag

SEQ ID NO: 52261 - DNA, 388 bp, Glycine max
  Clone ID: LIB3167-024-P1-K1-B7
ctagtttatcgtgaggagaatatgaagttgttggttttctttgttgctgcagtagttttggtagcatggccatgccatggcgcaggctaccaaaggttccttttccgaatgaaaactggctatggtgagcgttcttcggaggtaaaatgcgcaagttttaggcttgctgtggaagcacacaacatccgagcctttaaaaccattcctgaagagtgcgttgaaccaacaaaggactacattaatggcgaacaatttagatcagactttaaaacagttaaccaacaggctttcttttatgctagtgaacgcgaagtccatcacaccgacatatttatattcggcataaataacaccggattctctaatatccaatactatgaaaaacatg

SEQ ID NO: 52262 - DNA, 288 bp, Glycine max
  Clone ID: LIB3167-024-P1-K1-B8
ctctcacaaacacactgtctcctggggatcgaattgtatcgctcctgattggccagttcaccttgctttggattgatcagcagcaacgcctgaagttcaatgttgatgttgccgtgagtgaatggggccatggggctaagctagatgttctggaatcaaagattggttcagatactttacacactataaaggcaagttgcattggtcacaatgagactgcaactggggtcaccaattacttgaccaaagggagacaaattgttgattcctaccatcatccagccctcc

SEQ ID NO: 52263 - DNA, 409 bp, Glycine max
  Clone ID: LIB3167-024-P1-K1-B9
aggacacataatgatgactgtatcaataagaagactgttgaaacttctctatcctagcttgattcgacttgatgaatatcttctgaaggcatctgtacaggctaatgacttaaaaagtgttgagagaaggttacctttgactggggagagcttagactctagaggtctttatatttatgatgatggcatccggttcattatatggtttggtagggtgatttcacctgatatagcaaagaatttacttggggcagactttgctgcagaattatcaaagactactctcagtgagcatgataatgaaatgtcaaggaggctggtgaaggtacttgagaagttgagaaatacagatcgtgcatattaccagttgtgccaccttgtgaggcaaggtgaacagcccaaagaggga

SEQ ID NO: 52264 - DNA, 414 bp, Glycine max
  Clone ID: LIB3167-024-P1-K1-C1
cccacgcgtgcggacttgctttcttcttcacttcaaactcgccaatctcgaagatggcaatagaataggcatctcccaattgggttccagccgcagccggatgtttggcagccttggccgccctcctactgttgcttctccgcggcctccgccggcgtaaatacaatatccccccaggccccaagccctggcccatcataggcaacctaaacttaatcgggtccctcccacaccagtcgattcacgcgctgagtaaaacatacgggcccatcatgcacgtgtggttcgggtcgaaccccagcgtggtgggctcatacgtggacatggcgaaggccatgcataaaacccacgatgccaccctcgcctgcaggcccatattcgcggctggcaaatacacagcctacaactactcgg

SEQ ID NO: 52265 - DNA, 226 bp, Glycine max
  Clone ID: LIB3167-024-P1-K1-C11
gtcgcgagcggccccctttttttttttttttcataattgtaattaaattggtgttgtacttcagtgaaaacaggcaagagttgtgattattttcgcagttgtaaatgtgatatcccacaatgccgagttattaaattggtgagacttcactgataaaagctaagagctgtgattaaattgtagtgtctttgagaacttagagtagtcaccttctctttttttgatt

SEQ ID NO: 52266 - DNA, 237 bp, Glycine max
  Clone ID: LIB3167-024-P1-K1-C12
gtggaatagaatggagtggatggtggcagaattgaatggaataaattaaaaataaaaagtttcgttctaaaaaaaaaaaaaaaaaaaaaaaaaaaaaaaaaaaaaaaaaaaaaaaaaaaaaaaaaaaaaaaaaaaaaaaaaaaaaaaaaaaaaaaaaaaaaaaaaaaaaaaaaaataaaaaaaaaaaaaaataaataaaaatattaataaaataaaaacaataaaaaattttaaaat

SEQ ID NO: 52267 - DNA, 195 bp, Glycine max
  Clone ID: LIB3167-024-P1-K1-C2
cccacgcgtgcgcaagatccttccactccaaatgcagtttcatacaaaacagcagcgagagagaaactgataaggcagggttccaacattgttggaatcattggagaccaatggagcgatctcctcggaggccacagaggcgaaagcaggaccttaaagcttccaaatcccgtgctctacatacaagattcttta

SEQ ID NO: 52268 - DNA, 419 bp, Glycine max
  Clone ID: LIB3167-024-P1-K1-C3
actcgttcttcttcttttgttgttctgtgtttgtgtttgttttttctctcacctgaaaatgtcttgctgcggtggtaactgtggttgcggaagctcctgcaagtgcggcaacggctgcggaggctgcaagatgtacccagacttgagctacactgagtcaaccaccaccgagaccttggtcatgggagtggcacctgttaaggctcaatttgagggtgctgaaatgggtgtgcccgctgagaacgatggctgcaaatgtggaccaaactgctcctgcaacccctgcacttgcaagtgaggtgttgggagagcaagcttcaagcagagatagcccttaattaggaataatgataaactattaatgtgtagctaaaaacttatgtattatgtctgtgatggttttcgtgcactcttgtgtt

SEQ ID NO: 52269 - DNA, 364 bp, Glycine max
  Clone ID: LIB3167-024-P1-K1-C4
ggggatagatagagtgatacgcgtcacattttcataataataaaaaaatggcagcggcggcggcagtgacggtgctactcccacctaggattccgaccaccaccaacgttacccgctgctctgctttgccttctctccctcctcgcgtctccaacaccaaaaccactttgttctcaccttccctcaacaacttttcagtgtcccgaaaatcttctctgcttcagaccagagcttcttcagaggaatcatcctcagtagatgccaatgaggtgttcacagatttgaaggaaaagtgggatgctcttgaaaacaagtccacagtacttctttatggtggaggggctatagttgctatttggctatc

SEQ ID NO: 52270 - DNA, 197 bp, Glycine max
  Clone ID: LIB3167-024-P1-K1-C5
acgtagtagctataggtatatacataataataataatatacggctatactattattgactatctggaattaatagtatatgagagttaattaagacagcttgattggaaacaacaaagaaaagttttgatcggctaaaggggtagacattctgatgtatttttgtattaccaagaaggcaaagagttatgaattttc

SEQ ID NO: 52271 - DNA, 402 bp, Glycine max
  Clone ID: LIB3167-024-P1-K1-C6
cgaatccccggcatgccactcaccaaccaacaccaatcattcccttccaatacccgccgcagggccacgacggcgaaggcggagctcgggacggcggtggcgcggacgggcggagccggttaccaatctccgtccgtcgacgttcccacgcataaggtcacagtccacgacagacaacgaggaatcgttcacgagttcgtcgtgcctgaggaccagtatatattacatactgctgaggcccagaatattacccttccattcgcctgcaggcatggttgttgtactagctgtgctgtacgtataaagaagggacaaattaggcaaccagaggcacttgggatatctgccgaattgagagacaagggttatgcacttctttgtgtgggctttccgacctctgat

SEQ ID NO: 52272 - DNA, 415 bp, Glycine max
  unsure at all n locations
  Clone ID: LIB3167-024-P1-K1-C7
caatcttctgagagtgtttggttgaaagtagcaaagatgtttcctttcgggcaaaagggtcaaaagataaaggggactatggtggttatgcagaagaatgtgttggatatcaacagcatcaccagtgttggagggatcgttgaccaaggcttaggcttcataggcagtgcagtcgatgcacttacttttgcagccaccaaaatctccatccagttgattagtgctaccaaggctgatggtgggaaaggaaaaattggaaagagtacaaatttaagaggaaagataacattaccaaccttgggagctggcgaacaagcatacgatgttaattttgaatgggacagtgacttcggaattcccggtgcattttatattaagaacttcatgcanaatgagttctacctcaagtctctaa

SEQ ID NO: 52273 - DNA, 412 bp, Glycine max
  Clone ID: LIB3167-024-P1-K1-C8
gactcattcgccttcaagccagggaaatacaacgcccagaagttgtgcctggaaccaacttccttcacggtgaaggcagagggcgtggccaagaacgccccacccgaattccagaacaccaagctcatgactcgtctcacctacaccctggacgagattgagggtcccttcgaggttacatccgatggaaccgtgaaattcgaggagaaagacggaattgactatgctgctgtcactgttcagcttcccgggggagagcgtgtgccattcctctttaccattaagcagttggtggcatctgggaaaccagacagcttcagtggggagttcctagtgccttcttaccgtggttcctctttcttggaccccaagggaaggggtgcctcaactggttatgacaatgctgttgctt

SEQ ID NO: 52274 - DNA, 404 bp, Glycine max
  Clone ID: LIB3167-024-P1-K1-C9
ctcaggacaatattggacttataattgtgagagtagtcatggaggggatggctcccaattcatgtgcaaggccagttgtagagaagaaagcaaggccacaagagcaactgaattgtccaaggtgcaattcaaccaatacaaagttctgctactacaacaactacagcctcacacagccaagatacttctgcaagacttgtagaaggtattggacagaaggagggtctctgagaaacgttccagttggaggtggttcaagaaagaacaagaaggtctctgtgacagcttcatcatcaccaaaggttccagacctaaacccaccaaaccactcagctatctcatcacacaaccctaaaataatgcatggtggccaagatctcaatcttgctttccagccatggaaa

SEQ ID NO: 52275 - DNA, 417 bp, Glycine max
  unsure at all n locations
  Clone ID: LIB3167-024-P1-K1-D1
cctacttctacttcccccctttgctctcaaaccttatcacctaatccttatcctcccaaaccagaaaaccatgtctacctccgcagcttccctcgcactcccaaccctcactctccgaacccgacaacctctatgttctccccaatgcttctcctcgtccctctccctcacacccaacaacaaacccatttccatttctgctgtttttctcaaaccaacaactctgtcgtcgtctcgcttcgttccccacgtcgtggtgtcgtcggatttggggcaggaggaggacaccttcagtgacggagacggccccagcttctcccccgaccttaagctctttgtcgggaatcttccgttcaacgtcgacagcgcgcagctcgcggagctctttgagagtngccggaatgtggaggtggttga

SEQ ID NO: 52276 - DNA, 406 bp, Glycine max
  Clone ID: LIB3167-024-P1-K1-D10
tgccatttcaatccccagtttcttcttcaacgtcctcttacgagcagatcccaattctccttcccagtttcaaaccctaattccctcattcccatggcctcagaagagcccactgtcgcggtggaacccgctcccgaacctgccaccgccgagcctcccccggaggagaaggaggagcccaaacctgaagccaaggctaagaaaaccaaggaacccaaacctaaaaaggtttccagaccacgcaaccctcccactcatccttcctacgaggagatgattaaagacgcaattacctcgctgaaggagaaaaccggttcgagccaacacgcgattgcgaagttcatcgaggagaagcacaagcagcttccaccgaacttcaggaagcttcttctctaccatttgaaga

SEQ ID NO: 52277 - DNA, 406 bp, Glycine max
  Clone ID: LIB3167-024-P1-K1-D11
tgattacattgggaagaaatatgttgtgctcttcttctacccgttggacttcacctttgtctgccccacagaaatcactgctttcagtgaccgacatgcagagttcgaggcactaaatactgagatattgggtgtttcagttgacagtgtgttctcgcaccttgcatggatccaaacagatagaaagtcaggtggccttggtgacttgaactatcctttgatttctgatgtcaccaaatccatatcgaaatcttatggtgttctcattcctgatcagggaattgcattgagaggattgttcattattgacaaggaaggggttattcagcattctaccattaacaacttggcaattggtagaagtgttgacgagacaaagagaactctccaggccttacagtatgtg

SEQ ID NO: 52278 - DNA, 398 bp, Glycine max
  Clone ID: LIB3167-024-P1-K1-D12
gcgactcttacgtccacgcgttcgtccacgcgtgcggtttcatttgcaacctatgcgtgatcagaagggagaagagcaaaattttattgttgttcaactagatggttgtcaacatgtatagcctcttgacaactgcataagataaaatactgctgaggaaggagacacaattgctaaaacatactgcataaaatgtcgatggggcagtgagagatcttgcgtatgctaataagaaaccagatgatttatggactaatacattaaaaacagatgacccgtaacctgataggaaggatgaccctgcatggaaagctatacagatagtcctagtaagtggcgaacagctatgctttaagcatttcaaggcaattcatccatatgggtcaggagatactggc

SEQ ID NO: 52279 - DNA, 415 bp, Glycine max
  Clone ID: LIB3167-024-P1-K1-D2
ggcagttaatgatcttcgggagagtgcaaacgctaaaatcagtaggctgaggcaagaaaccttaaccatgcaagattccacttcttctgttaaagcagaatggaaacttcacatggaaaaaacggagtccaactatcatgaggatacatctgcagtagaatctggaaagaatgaccttgtggaggctattcagcgctgccgcaaaaaggcagaagtaggtgcacaacaatggagaaatgctcaagaatccatccttagcctagagaagagaaatgctgcttctgtggatactattattcggggaggaatggaagataatcatctccgacgagaccgattctcaagtgctgtgtcaactacacttgaagatgcagaaatcgcaagcaaggatattaactcatccattgaacattca

SEQ ID NO: 52280 - DNA, 205 bp, Glycine max
  Clone ID: LIB3167-024-P1-K1-D3
gtctttttgaagatacatatggattcttacctacgaagtcagcagtcatggcacaagcattggtggcatccacagagatctgacactatgaaagcaacattctttcctaaggcaaggcaaggaggccaatgccaatgctattaggggtagttgaatgcatgaaaactgcgaagaacaacatggcctaaagtgttcatgcattgcc

SEQ ID NO: 52281 - DNA, 307 bp, Glycine max
  Clone ID: LIB3167-024-P1-K1-D4
cactcgcgcagccatggctattctctcattcactgcccttaaggaacgcgctggcctagagggtgccgctggtaaagtcttatctccacactcaacaatgtttgacatcaaggcttcacttaaagacattcaagaactctatgagtccactcccgctagcgcagtgctgtctcacgactccatgctcatataagtgggatctggtgagcactacggggctctggctctcgtatcgaacaaatgctccttgacccttcaaccgaagatcgagctcgagatcaacgacagttgctgctacatccacaaa

SEQ ID NO: 52282 - DNA, 410 bp, Glycine max
  Clone ID: LIB3167-024-P1-K1-D5
gaaaaaaacaaaaatgctgagaatcgctgctagcgcgaagacaattgttcgaacggggtcgttggaggcgccaccattggggattagggttctgcctcggctctaccacgagagggtggtggaccactacgataacccccgcaacgttggatccttcgacaagaacgaccccaccgtcggaacgggtcttgtcggagcacccgcgtgtggtgacgtcatgaaactccagattaaggttgatgacaaaacggggaagatcgtcgatgctcgcttcaaaaccttcgggtgtggatccgctattgcttcctcctccgtcgctactgaatgggttaaggaaaagcaaatagaggaagttttgaccattaaaaacactgaaattgcaaagcatctttcactttcaccagtcaagc

SEQ ID NO: 52283 - DNA, 371 bp, Glycine max
  Clone ID: LIB3167-024-P1-K1-D6
caacaagggaatccatccatggcgaacaatatagatcagactccaaaacagttaaccaacaagcttacttttatgccagagacctcgaagtccatcccaaggacacatttgtgttcagtatagatggcaccgtactctctaatattgcatactacaaaaaacatggatatggggtggagaaatttaactcgaccttgtatgatgaatgggttaacaagggcaatgcaccggcactggccgagactcttaagaattacaacaagctggtgtctcttggcttcaagattatattcttgtcaggaagaacactggacaaacaggccgctgcagaagcagacttaaagaaggctggctaccacacatgggaaaaa

SEQ ID NO: 52284 - DNA, 416 bp, Glycine max
  Clone ID: LIB3167-024-P1-K1-D7
aaaagattcaatttttatgcaaaagttttgttcctttaggatttcagcatcagtggctacagcctgcatgcttcacggtgcaagcagccggcccgcaaccgcccgcaaatcctctggcctttccggaaccgtccgcattcccggcgacaagtcgatctcccaccggtccttcatgttcggcggtctcgcgagcggtgaaacgcgcatcaccggccttctggaaggcgaggacgtcatcaatacgggcaaggccatgcaggccatgggcgccaggatccgtaaggaaggcgacacctggatcatcgatggcgtcggcaatggcggcctcctggcgcctgaggcgccgctcgatttcggcaatgccgccacgggctgccgcctgaccatgggcctcgtcggggtctacgatttcgaca

SEQ ID NO: 52285 - DNA, 406 bp, Glycine max
  Clone ID: LIB3167-024-P1-K1-D8
catggcagcaacattgatggcagcaacaacaagttctggtactcttaaagcaactcctttccttggccaaggcaagggtgccaatgccaatgctcttagggatgttgtctccatgggaactgggaagtacaccatgggcaatgatttgtggtatggaccagacagagtgaaatacttgggacccttctcagctcagaccccttcatacttgaaaggagaattccctggggattatggatgggacactgctggcttatctgctgacccagaagcatttgccaagaacagggctcttgaggtgatccatgggcgatgggccatgcttggagcactaggatgcatcaccccagaggtgctagagaagtggttgagagtggacttcaaggagccagtgtggttcaaagct

SEQ ID NO: 52286 - DNA, 414 bp, Glycine max
  Clone ID: LIB3167-024-P1-K1-D9
gctgtggctactggtgctgttgctgtacaagttgaagctgtggaggtcaagattgtctgtgctcagagttctgtggattcgtcctccggtgatagtttggagatgaaagccaagactggtcccagtagatgtgctacatgccggaaacgtgttggtttaactggtttcagctgcaaatgtggcaacctcttctgtgcaatgcatcgctattctgataaacatgattgcccttttgattataggactgttggtcaggatgccatagctaaagccaaccccataattaaggcagataagctcgacaaaatctaggcatgcactactgaaggttaatgtatgaaccttgaagcttcatcttctatatgtaagtttcatatatgttgtcttcctggttttttaggtgtcctttagtga

SEQ ID NO: 52287 - DNA, 373 bp, Glycine max
  Clone ID: LIB3167-024-P1-K1-E10
accacgcgtccggggattgcaatgatgcttggattcgagtgtgggtcaagaaaggaggaatgatcatcttacctgctggaatttatcatcgctttacactagatgagagcaactacattaaggctttgcgtttttttgttggtgagccagtttggactccacacaatcgtccaaatgaccatctccctgcaagacaacaatatgtcaaggattttgtggaaaaggatgttggcaaccatgctgttgatgccgccgcgtaagatctggttccgcctaatcgtagtacgtgggactgagactttgtgttgctaaagtaaggtttgaacaaatgaaaataatggtgcctttaaataaagggtcccagctttttatg

SEQ ID NO: 52288 - DNA, 346 bp, Glycine max
  Clone ID: LIB3167-024-P1-K1-E11
caactctccacttggtgttgcgtcttcgtggtggtatgcagattttcgtgaagactgttacgggtaagactattaccctcgaggtggagagctctgacaccattgacaatgtgaaggccaagattcaggacaaggaaggcatcccaccggaccagcagaggctgatttttgctggcaagcagctcgaggatggaaggaccctcgctgactacaacatccagaaggaatcaacccttcaccttgtcctccgtctccgtggggggttttaagctcgttgtgtaatgttggatgtgttcccaaaacatttgaagaactttgatgtttaatgggtctgtaataatgtccc

SEQ ID NO: 52289 - DNA, 410 bp, Glycine max
  Clone ID: LIB3167-024-P1-K1-E12
cccacgcgtccgcaattcaaccgcctccactctcacgcaaaccatttttcttttctttctctccctctgagcctttcatcgctgcctcggagagatggcagtgtcggaaggatcaccaacccctcagacggttggcaatgcttttgttgagcagtattactccatactgcatcaaaagccagaccaagttcacagattttaccacgagtctagcatcctaagccgacctgaagaagatggtaccatgactatggtgactactactttggaaattaataaaaagatactctctctggattacacaagctttagggtggaaattctgagtgctgatgcacagccttcttacaaggatggggtaattggtgtagtgactggctgcttaactggaagtgacaatctgaaaagga

SEQ ID NO: 52290 - DNA, 319 bp, Glycine max
  Clone ID: LIB3167-024-P1-K1-E2
aactgactttgttggtagaggtgagaaattcaaggagttggtttcacagttcacttcgattggaacgccaatgcgtgaatcgtgaatgtatgaaccaattctgccttcggcgttctaattgaagtgaactgtgaaactgactttgttggtagaggtgcgaaattcaaggagttggttgatgatcttgcaatgcaaggtgtaacctgcccacaagcgcagtgtgtgtccattgaagatattccagagactattgtgaacaaagaaaaggaacttgaaatgcagagagaggacctgctttcggaaccagagaacatcatag

SEQ ID NO: 52291 - DNA, 411 bp, Glycine max
  Clone ID: LIB3167-024-P1-K1-E3
tcggccacgcgttcggccacgcgttcgaagctctctatgacatctgctttcgcacgcttaagctcaccactccaagctttggggatctgaaccatctaatttcagccaccatgagtggtgtgacatgttgtcttcgtttccctgggcaactcaactcagatcttcgcaaacttgctgtgaatctcattcccttccctcgtctgcactttttcatggggggttttgccccactcacatctcgtggtttccaacagtacagagctcttactgtacccgaattgacccaacaaatgtgggatgctaagaacatgatgtgtgcagctgatcctcgccatggtcgatacttgacagcttctgcgatgtttcgtggtaagatgagcacaaaggaggttgacgaacagatgatcaatg

SEQ ID NO: 52292 - DNA, 389 bp, Glycine max
  Clone ID: LIB3167-024-P1-K1-E4
gcacattttggttatctttagcacagtgttgaagataacgaacgaatagtgccattactgtaaccaaccatggtttccgtcttcaacgagatcctattcccgccgaaccaaacccttcttcgcccctccctccattccccaacctctttcttcacctctcccactcgaaaattccctcgctctcgccctaaccctattctacgctgctccattgcggaggaatccaccgcgtctccgcccaaaaccagagactccgcccccgtggactgcgtcgtcgtcggcggaggcgtcagcggcctctgcatcgcccaggccctcgccaccaaacacgccaatgccaacgtcgtcgtcacggaggcccgagaccgcgtcggcggcaacatcaccac

SEQ ID NO: 52293 - DNA, 341 bp, Glycine max
  Clone ID: LIB3167-024-P1-K1-E5
attgaagattccacaacatgtgtgagggagatccaaaaagagagagtggaaaagatagcgcggttgatcatcagaggagaggtgcgcagcggcatcagctattatccaccgcgaccaaagcgtccaaggtggaggaagcgagctactcaaggcaaatggcgtctggaacggactccttggtctgaaggacatataggagtgcggctacgacagacaaaccgtgctaggtctggctcacacaaaagaagagagacacccacaagtgcgacaagatcgggaagcgtgcctgctactcgcccgaggtaactggtcatgtcaacaaggtaaaattaccaaactca

SEQ ID NO: 52294 - DNA, 408 bp, Glycine max
  Clone ID: LIB3167-024-P1-K1-E6
cggacgcgtgggcggacgcgtgggtgcaaaaatggcatcattcaccatgacagcttccatgcttggcggcccagccgtcaccaaccggttggcagtagcaacgcagaggagatcactcgtagtgaatgctgccaaagctgttgaagcggaaaaggtcagttatgacaatgacatggatggtagcaatggaaggaggaacttgatgttcgccgcggcggcggcggctgctgtttgctctgttgctgggatggcagtggcagatgagccaaaaccaggaaccccagcagccaagaaaaagtatgctccgatttgtgtcaccatgccaactgctaggatttgtcgcaattgagggactcggtttttattttacttctgatgatcggaaatgtgcattagggttgtagtaat

SEQ ID NO: 52295 - DNA, 406 bp, Glycine max
  Clone ID: LIB3167-024-P1-K1-E7
gaatacttctatcaggagtcctatgatggggaggttgttttcagggctctagaagagctttcactccgtcaactaccaaacctaaaaatgttatcaaggcagtatggggaaaacatgtttccacgtttttccatacttgaaattgatggctgtcctaaatttttgggagaggaagttttgctgcatcggttgcactctctctcggtaattagttgtggcaagttcaatttgtcagcaggttttaaatgcctgcagaaattgtggatttcagaatgcaaaggggtgaaaaatttgcaggctttgcaatatatgacttcccttaaggagataagattaaggaatcttcatgagctagaatccttacctgactgctttggcaacctttctttgcttcacacattgagta

SEQ ID NO: 52296 - DNA, 413 bp, Glycine max
  Clone ID: LIB3167-024-P1-K1-E8
acgaagcaaagatgtcgtccatgctgcgcttccctttctcgtttcctcagccccgaaggcctcaattccctcgcccattcaccgcattcgccgccgccgttgccggagcctccgccgccgtcgtggccgtctcctcctccgaccgctcctttctccggaatgctctgaattccttcttctcttctgacctatcaatgcctctctggggttcactgagtttggccgacagtggggtttccgtggttgagtcaaaaaccggaacttcgttcccttcggttttagacagttctcagaaactctgcggaattggcttgcggaaaaaaagcattttgggattgaagaacattgatgtatacgcatttggtgtttatgctgatgatgaggacataaagagacatctttctgagaaatat

SEQ ID NO: 52297 - DNA, 414 bp, Glycine max
  Clone ID: LIB3167-024-P1-K1-E9
gtttgttgtgagctataagctagtttatcgtgaggagaatatgaagttgtttgttttctttgttgctgcagtagttttggtagcatggccatgccatggcgcaggctaccaaaggttccctctccgaatgaaaactggctatggtgagcgttcttcggaggtaaaatgcgcaagttttaggcttgctgtggaagcacacaacatccgagcctttaaaaccattcctgaagagtgcgttgaaccaacaaaggactacattaatggcgaacaatttagatcagactctaaaacagttaaccaacaagctttcttttatgctagtgaacgcgaagtccatcacaacgacatatttatattcggcatagataacaccgtactctctaatatcccatactatgaaaaacatggatatgg

SEQ ID NO: 52298 - DNA, 418 bp, Glycine max
  Clone ID: LIB3167-024-P1-K1-F1
aatagacatgggttgtttcatggcatgttttggtctatccaacaaaagaaagcgtagaaagactatctacaaagtcctagctggacaccaaaaatatggaaattatgaagttcttgccataacagaaaaatccactatcccggattctgattccagaggaagagatgaagttaaggagcagaatagtgttaaaaccaagaagaagaaagttaccttcaatttgaatgtacaggtatatgagccaaaccccactgcttatcagatattgaataatgaggaagaagaaaataggaactatgctgcagaaacagaaggatctgcaaccttgcctgtgaaatacccttctaatcacagatattacaattccggagatggatatgatgaagaagatggaatggcatatgaagattctgacatt

SEQ ID NO: 52299 - DNA, 409 bp, Glycine max
  Clone ID: LIB3167-024-P1-K1-F10
cccacgcgtccgatttgattccttagttcagcattctattattatatatggcttcttcaccttcctcagaaaacaaaaacctagagggagtagctggtggtgccggagagaaacccattccacttggtgagaacgttctgcagaagcatgctgcattctttgacttgaataaagatggtgtcatctacccatgggagacttttaaagggttgcgtgaaatcgggactggggttttgctgtccgttggaggtgctattttcatcaatgtgtttctcagtcagagtactcgtcccggaaagtttccatctatactttttccaattgaaattaaaaatatccaacgcggcaaacacggcagtgacactggagtctacgatactgaaggaaggtttgtaccttcaaaatttga

SEQ ID NO: 52300 - DNA, 408 bp, Glycine max
  Clone ID: LIB3167-024-P1-K1-F11
ctataagctagtttatcgtgaggagaatatgaagttgtttgttttctttgttgctgcagtagttttggtagcatggccatgccatggcgcaggctaccaaaggttccctctccgaatgaaaactggctatggtgagcgttcttcggaggtaaaatgcgcaagttttaggcttgctgtggaagcacacaacatccgagcctttaaaaccattcctgaagagtgcgttgaaccaacaaaggactacattaatggcgaacaatttagatcagactctaaaacagttaaccaacaagctttcttttatgctagtgaacgcgaagtccatcacaacgacatatttatattcggcatagataacaccgtactctctaatatcccatactatgaaaaacatggatatggggtgga

SEQ ID NO: 52301 - DNA, 401 bp, Glycine max
  Clone ID: LIB3167-024-P1-K1-F12
cggacgcgtccgcccacgcgtccgcccacgcgtccggataaggggcagctgtactatgtgtatgagattgatggtgttggcactcatagcttgatctcagtgacttgtgctaagaacaagctctatgcacattttgtcaatgctcctactcctgagtggaacagagataaggacgtgttgaggcatgttcatgagtcttttaagactgtggggtctttttagttggcttgtggtgttttgtattttgtagaggtaatggatgattatctattatgaggatgaggatggtttcttttgatgataaattttaagtttttcctacttgtctgcttgattcaatttttggcatagttagcttcaatttggaactgttttaaatagagtgtagctgttgcaaggtg

SEQ ID NO: 52302 - DNA, 405 bp, Glycine max
  unsure at all n locations
  Clone ID: LIB3167-024-P1-K1-F2
cccacgcgtncgggaataaaatatgcagtatttacagacaaaagtattcggttattggggaaaaatcaatatacttttaatgtcgaatcgggattaactaggacagaaatcaagcattgggtcgaactcttctttgatgtcaaagtaatagctatgaatagtcatcgactcccggtaaagggtagaagagtacgacctattatgggacatacaatgcattacagacgtatgattattacgcttcaaccgggttattctattccacctcttagaaagaaaaaaacttaaatcaaaatacttaatagcatggcgatacatttatacaaaacttctaccccaagcacacgcaatggagccgtagacagtcaaagtaaatccaatccacgaaatcatttgatctatgga

SEQ ID NO: 52303 - DNA, 390 bp, Glycine max
  Clone ID: LIB3167-024-P1-K1-F3
actggatatggtggtggtggtggcggtgtaagcggctgtggaggatatggtggctgtgggagagaccgtgcatatggtaccttctgcccctccctttatttgtgatgtaccccttctttggatggccttactcttacgaatcaaaacccgcaactttggacgtcgatagagggctttcgtcgctacccaccataactgacgaggggtgaccactggtagcaaggtgtattaggtccaattcatagtacctgaaagcacactttactcaaattgggaggaggtgttagtaggcatgatcggtccaggggctgtaaaaatattattgaaggatttgaaagtcttcgacacatttaatacttggttgcattataaatatgttgaagcaaatta

SEQ ID NO: 52304 - DNA, 205 bp, Glycine max
  Clone ID: LIB3167-024-P1-K1-F5
atctagctacgtagctgcagcattagggtcattgatctgctccaatgctgaacggaacagggagttatgagtcgagaaggaacaagactcacactctctgtgtgaggtgaggccggcgcatatttcatctaacagacgagtctgtacgccgcttgtgctttccctgccgtcacgcacatatgaaatataactggagcctcaaggc

SEQ ID NO: 52305 - DNA, 411 bp, Glycine max
  unsure at all n locations
  Clone ID: LIB3167-024-P1-K1-F7
aaaaaaaagaaaaaagaaaaaagaaaagcactaaaaaaaaatgaagaagggtttctcccttgtgctgctgattcttctgatccagtacaacaacgttgtcaacgcctacaacaacaaaaactgtgtcacagaggattgcctcatcggcaacaaggatttggaatcagagttctactttggatcccatgtggccagaatgctctacgatgtgagccaatctgtgagtggcaaaacaggcaataaaaataacaaagctgttaattgtccaaataagcaaggctaccgaagctgcttgccttccaaaaacggtggtggccctaagcaaagttgtggcgattacaccagggtttgctaagaactcgttccaacccttgtgatttcatttctgattnttaagaatgtgatatgatg

SEQ ID NO: 52306 - DNA, 395 bp, Glycine max
  Clone ID: LIB3167-024-P1-K1-F8
aaaaaaaaaaaaaaaaaaaaaaaataaaataaaaaaaaaaaaaaaaaaaaaaaaggggagaaaaaaaaaaaaaaaaaaaaaaaaaaaaaaaaaaaaaaaaaaaaaaaaaaaaaaaaaaaaaaaaaaaaaaaaaaaaaaaaggggggggcccttttaaaggatccaatttttcttccccgttcttgcaacgaaatatttttttttttgggccccctaaattaaattaattggccttgttttaaaaactttgttaactggaaaaacctttggtttccccaatttaaaacctttgaaaaaaatcccctttttgccagttggggtaataactaaaaggccccacccattctccttttcaaaaaattgcccacccttaatggcaaatggaaccccccctt

SEQ ID NO: 52307 - DNA, 412 bp, Glycine max
  Clone ID: LIB3167-024-P1-K1-F9
gttgatcgagataactagaaacagtgtgatgaaaatgaaggtccttgttttcttcgttgctacaattttggtagcatggcaatgccatgcgtacgatatgttccctctccgaatgaacactggctatggtgcccgtactccggaggtgaaatgcgcaagttggaggcttgctgtggaagcacacaacatctttggctttgagaccattcctgaagagtgcgttgaagcaacaaaggaatacatccatggcgaacaatatagatcagactccaaaacagttaaccaacaagcttacttttatgccagagacctcgaagtccatcccaaggacacatttgtgttcagtatagatggcaccgtactctctaatattccatactacaaaaaacatggatatggggtggagaaattt

SEQ ID NO: 52308 - DNA, 414 bp, Glycine max
  Clone ID: LIB3167-024-P1-K1-G1
gttgagaactaagaaggagaagcaaatggcttcctcaatgatctcttccccagctgtgaccactgtcaaccgtgccggtgccggcatggttgctccattcactggcctcaagtccatggctggcttccccaccagaaagaccaacaatgacattacctccattgctagcaacggtggaagagtgcaatgcatgcaggtgtggccaccagttggcaagaagaagtttgagactctttcctacctgccagaccttgatgatgcacaattggcaaaggaagtagaataccttcttaggaagggatggattccttgcttggaattcgagttggagcacggtttcgtgtaccgtgagcacaacaggtcaccaggatactacgatggacgctactggaccatgtggaagctgcctatgtt

SEQ ID NO: 52309 - DNA, 280 bp, Glycine max
  Clone ID: LIB3167-024-P1-K1-G10
tggacacagggggaagaaagcgaacgaccaagatttcatcgttgctccaaaaaaggaaggatggcaacgccaagcgtgcgcattgaagactctgggtatgaacactgggtagggcgcccgatctgcgggggggaaatgcacaagtacgcggctagctgaggaagcacacggcagtctctggttgatgagaccatgcttaggagagcgcgcaggcgcacacaaatgaatacattcatggcgaacaatatagaacagactgcacaacagttaaccaacaagc

SEQ ID NO: 52310 - DNA, 411 bp, Glycine max
  Clone ID: LIB3167-024-P1-K1-G11
cccacgcgtccggttgatcgagataactagaaacagtgtgatgaaaatgaaggtccttgttttcttcgttgctacaattttggtagcatggcaatgccatgcgtacgatatgttccctctccgaatgaacactggctatggtgcccgtactccggaggtgaaatgcgcaagttggaggcttgctgtggaagcacacaacatctttggctttgagaccattcctgaagagtgcgttgaagcaacaaaggaatacatccatggcgaacaatatagatcagactccaaaacagttaaccaacaagcttacttttatgccagagacctcgaagtccatcccaaggacacatttgtgttcagtatagatggcaccgtactctctaatattccatactacaaaaaacatggatatgg

SEQ ID NO: 52311 - DNA, 411 bp, Glycine max
  Clone ID: LIB3167-024-P1-K1-G12
caagatcgagtttcaatattcgaccccttaatttcatcttttattctctctctatgggtctcttgctttctttgtaaccccacctctgatccattctttcttcctcacacttgtttaatttgcacaaatatattctactccgaataaaccacctcataatggaggagtcaggggaaaattggccttccgattcttatttagatgacttcgtcaacgatgatttaggttttgatgatgaagaatttggtagtgaagatgattcattttctgggatgggcgagaccgacagaaagaagagacagcgagaactcacagagaggttccttgcactttcagccaccataccaggcttcaaaaagacggacaagacttccatcctggccaatgctagcagctatgtgaaacaacttt

SEQ ID NO: 52312 - DNA, 404 bp, Glycine max
  Clone ID: LIB3167-024-P1-K1-G2
cccacgcgtccgcgcaattctgaatttgcgggttttggatttggacttggtcgtcaacacagtctaattaatatctttttgctccttcgcttatgaatcttcttcttcttcttcttcttgttcctgcaacgcactgaattcgatcaatcaatccatcttcaattgctttttttcgatcggaggaaaatggccgatcagttatcgaagggagaggaattcgagaaaaaggctgagaagaagctcagcggttggggcttgtttggctccaagtatgaagatgccgccgatctcttcgataaagccgccaattgcttcaagctcgccaaatcatgggacaaggctggagcgacatacctgaagttggcaagttgtcatttgaagttggaaagcaagcatgaagctgc

SEQ ID NO: 52313 - DNA, 414 bp, Glycine max
  Clone ID: LIB3167-024-P1-K1-G3
attgagagtaacacaccaagagagagcggatgtgtcggatacttataaaaatgtactatatgtatgtatatctagcgagcgagagagagtgacattgagctctggaagaagttctgcactgaacccaaatgcacctctattcatacctgctgctcttcggcaggtggaggatttttcacctcaatggtgggatcttgtgaaatcttcaacatggtttcgtgattattggttgagccaacataaggaggaagaatttgaagttgccaatgactctagtaatgatgatattgagaatatgctctcagaaacttttgatctaggcatggaagaagacttcaatgttctagagaacgagtttgagcagttggtgatgtcctctgaagctctagatcattctgatcctaatgctggaaa

SEQ ID NO: 52314 - DNA, 409 bp, Glycine max
  Clone ID: LIB3167-024-P1-K1-G4
cccacgcgtccgcccacgcgtccggtttgtaaaggtcagtatggatggtgctccttatttaagaaaagtagacttgaagaattactctgcgtatgccgaactatcttctgcgctggagaacatgttcagctgttttaccataggttcttgtggatctcatggaaatctgggaggggaggtgctgaatgaaaccaagctgaaggatctgcttcatggatcagaatatgttcttacgtacaaggataaagatggcgactggatgctagtgggtgatgttccctgggagatgtttattgagacatgcaagaggctaaggatcatgaagagctccgaagccattggtctagcaccaagagctgttgaaaaaagtaagagaaggaactaggcaggatcaagcatctcatcacac

SEQ ID NO: 52315 - DNA, 415 bp, Glycine max
  Clone ID: LIB3167-024-P1-K1-G5
ctcgcgacaaccttaggaatctcgatcgccgaaaaaacctatgcagccccgaacacacacactctgcattccaacttgtttaaatcatgcctctcgattcacccttctctctcaataaatcttttggcctatgaaatcagattcttcgccaccgccacagtcataataaagttttatttttccaaataaagggaatggcgactcctgttgagcctcctaacgggatcagaactgaagggaagcattattattccatgtggcaaaccctgtttgagtttgattcaaaatacgtgcccatcaagccaattggccgcggagcatatgggattgtgtgctcttctgtgaatagagagacaaatgagaaggttgccatcaagaagatacagaatgcctttgaaaaccgggttgatgcact

SEQ ID NO: 52316 - DNA, 53 bp, Glycine max
  Clone ID: LIB3167-024-P1-K1-G6
aaaaaaaaaaaaaaaaaaaaaaaaaaaataaaattaaaaaaaaaaaaaaaaaa

SEQ ID NO: 52317 - DNA, 247 bp, Glycine max
  Clone ID: LIB3167-024-P1-K1-G7
cccacgcgtccgggaggagcagcggttttcggatacgggggaggcggtggtggaggaagtggaatttgtattttttctacacagtacctctacaccattaacacctacacctgcaaatactgcaacacaatcatttgattttataactgcaattttattcactcatacttctactttttatcccctttcaccagatatttctactatgtgcctcaatctaattccaagaaaacatcatattgacatt

SEQ ID NO: 52318 - DNA, 411 bp, Glycine max
  Clone ID: LIB3167-024-P1-K1-G8
aaaactttccctggaactgagttggagtataatttattcttgttttgcgcacttctcagatgaatccctagtttccttacaaggtcctctgtaccatttacaatggaacatgcagataaaggaaaagaatcatcaaatagtataaatgaagtagaagtcactaattctccaattatttgtggccttccagatgatatttctcttatgtgcctcgcaagaattccaagaaaatatcattctgtcatgaagtgtgtctcaaagagatggaggaacttgatttgcagtgaagaatggttctgttatcgccgaaagcacaaacttgatgaaacctggatttatgctttgtgcagggacaaatcaaatgagattttctgttatgtattggatccaaccttgtcaagaagatactgg

SEQ ID NO: 52319 - DNA, 369 bp, Glycine max
  Clone ID: LIB3167-024-P1-K1-G9
cccacgcgtccgaaacacaccaattgcatttgcattaccattcacaatggcaatctgctccacttccaactccctcattcccaccaaatctctaatcccccaatcccaccccctcattcccaacaccaggcccgccctccggcccaagcccggcccatccccttccatcttcgccgttcacgccgccgagcccgccaaaaaccccgtcgtcaccgacaagcccaagccccaagcccaacaacctcccccggcctcggcccgggcaacgaaatgggccgtggacagctggaagtcaaagaaagccctgcagctgcccgaatacccgagccaggaggagctggagtccgtcctcaaaaccctcgaggcttt

SEQ ID NO: 52320 - DNA, 218 bp, Glycine max
  Clone ID: LIB3167-024-P1-K1-H1
tgcaaacatggaaaattgctaccctacctttactaacgactacaatgactactgccgaggccgaaagcgcaaagaccgtgaggccgatatgctgggcgagctctagcgcccgcgtcactacgaggaagaggatgtgatagaaagggacatggattgagaaagagagagagaaagagatcacagcaatgacagcgattactctgcggcgacgcttaatg

SEQ ID NO: 52321 - DNA, 326 bp, Glycine max
  unsure at all n locations
  Clone ID: LIB3167-024-P1-K1-H10
ctcccatctcacacacccctcgcatccaacaatgtctctcaccattccctccaacctctccaagcccgccgccctccgccccaaactaagcccaaagctaaggtccgccgccacaaccaccatcgtctgcagcaccaccaacaacaacaacaacaacaacgtgtcctccgacctgaaggcgttctccgccgcgctggccctcttctncatcctnctcttcgcccctctccccgccggcgccgacatctcggggctcaccccatgcaaggagtcgaagcagttcgcgaagcgtgagaagcagtcgataaagaagctggagtcgtcgc

SEQ ID NO: 52322 - DNA, 411 bp, Glycine max
  Clone ID: LIB3167-024-P1-K1-H11
cccacgcgtccgcccacgcgtccgctcttatcttaagatggcaaccttgatcggttgccaatactactatctcttgttccttctttggtttatctctagcttaaccttcttattgtttttggactatcatgttatgtttctacgtgtgaaaatactactatttggtaacattcactcctttgacgttaatagaccagtgtcttcatcgctggctcgttgctgggaccagttcagcccagtaatccctcttggcctttatgcagacttgcaaacaacacaaatgcttgctcttgcttttcattcctagttgggggcatatgataccaaaggttgataatgtactggatgttgctcgtggaaactgataagcatttatgaagaaattatagtctatgatgcgtttggattctg

SEQ ID NO: 52323 - DNA, 403 bp, Glycine max
  Clone ID: LIB3167-024-P1-K1-H12
caaaaatggcatcattcaccatgacagcttccatccttggcagcccagccgtcaccagccggtcggcagtagcaacgcagaggagatcactcgtagtgaatgctgccaaagctgttgaagcagaaaaggtcagttatgacaatgacatggatggtagcaatggaaggaggaacttgatgttcgccgcggcggcggctgctgtttgctctgttgctgggatggcagtggcagatgagcctaaaccaggaaccccagaagccaagaaaaagtatgctccgatttgtgtcaccatgccaactgctaggatttgtcgcaattgagggactttggtttttattttacttctgatgattggaaatgtacaatgggggttgtgtaatgctttgatgatttcatttgatcc

SEQ ID NO: 52324 - DNA, 68 bp, Glycine max
  Clone ID: LIB3167-024-P1-K1-H2
gggaatcctttttttatcttttaaacacaactttttttttttttttttttaaccaaaacttggagcaa

SEQ ID NO: 52325 - DNA, 412 bp, Glycine max
  Clone ID: LIB3167-024-P1-K1-H3
atgtatttggcgcgtctaatggggtatgattatcatatccagtatcgttccagcatacataaccaggcggctgatgccctgtcaagattgccagaacaagacccatcaatgttcatgattctgtcagtaccgtgcttaactttcatggaagaacttcgccgtcaacttgacagccaccctgagtatcaacaccaacatcaaaatgttcgcgattgccccgccaaacaccctgaattttccattacacatgaccttgttctgaacagaggtcgtatttggttgccatggggacttccgataatttccaccttactcacggagtaccatgccatgcccactggaggacacataggggttgccaagaccttagctcacataacggaaaatttctattggcctggtctcagggatg

SEQ ID NO: 52326 - DNA, 429 bp, Glycine max
  Clone ID: LIB3167-024-P1-K1-H4
gtaccggaacgaagtgtcgaccaggcgtacgcccacgcgtacggtcgggtaccctcttcgttggcttcggctaagtttatcgggcatttggagcttagccataaccatttgtgtggatccattcctctcggagcacccttcgatcacctcgaagcgtcgtcgtttactagcaatgattgcttgtgtgggaaccccttgaagacttgctagttatagtgggtgacccgggatccgaatacgtacccggatagatacccgatttgtttacaaggtgtggtgtaataattttattttattttgttgttaagtggtgtaagtgtaatataacgttttagtgagaaagctgaaagagagaaaggaaaagaagtgagggcatatgcatctgcgtgcacgtgcacgacaagacaagggtttcaaggaaggaattca

SEQ ID NO: 52327 - DNA, 372 bp, Glycine max
  Clone ID: LIB3167-024-P1-K1-H5
caagacatcctcgtactacaacaacaaccaatggaatccaaatgcaaaattcaactctttttgctcacccttttcctcttcactctcaccctccatgcagaaactcttggaacttacatagttcagctacaccctcatggcataaccagcacttccttcacctgcaggctcaaatggcacctttcattcattcaacaaaccatttcctctgacgaggacccttctttgcgccttctgtactcgtaccggtcggccatggacggtttcgcagctcagctaactgagtctgagcttgagtacttaaaaaacttgcctgatgttatctcaatgaggcctgacagaaagctccagcttcagaccacttactcttac

SEQ ID NO: 52328 - DNA, 403 bp, Glycine max
  Clone ID: LIB3167-024-P1-K1-H6
cccacgcgtccgcccacgcgtccgctcttatcttaagatggcaaccttgatcggttgccaatactactatctcttgttccttctttggtttatctctagcttaaccttcttattgtttttggactatcatgttatgtttctacgtgtgaaaatactactatttggtaacattcactcctttgacgttaatagaccagtgtcttcatcgctggctcgttgctgggaccagttcagcccagtaatccctcttggcctttatgcagacttgcaaacaacacaaatgcttgctcttgcttttcattcctagttgggggcatatgataccaaaggttgataatgtactggatgttgctcgtggaaactgataagcatttatgaagaaattatagtctatgatgcgttt

SEQ ID NO: 52329 - DNA, 410 bp, Glycine max
  Clone ID: LIB3167-024-P1-K1-H7
cccacgcgtccgcccacgcgtccgcttctccttacttctcactctctttccaaaacactccctttctctttccccttacccttcttctgtgtgtgatgatgtagatagagaataaaaagagaccagtgtgcagtgagaaagaggttggtcacttcttgtgtggctttgttttgttctttgtgttggaatttgttgatgggtgaagagggagaagaggtgtcaagagataaggaacagcaacacatgggagtttatggaaatgagtggttgtttagtagtttctgtgcaaattggcgccgtttaagacaccagaattcctgttctatgcctccttttgagtgaaaaaaaaaaaacatcaaaacataaacttgttctctctcaacttttcatcttccgatcctaatatacat

SEQ ID NO: 52330 - DNA, 409 bp, Glycine max
  Clone ID: LIB3167-024-P1-K1-H8
caactttcctaactttagcaaccatccaagaagttgatcagttccttgtctctccttgaattataaaaccattcacagtcttgaacccaatttcactctttgcacctcaaacaccttataagcctcaatttcacaaccaaaaatgcaaagttcaatctcacaatctgagatttgcatcactgattaccttctaccccaagaagttccatctcaatttcaatttccagatatgagcaacaataacataccaatgaaccataccaaccttcaaatgcctcaaatcacatctttctccaagcctccaaggtcctcatcaaatctaagcaaccgcaaaccgtccttgagaaacatcacaatcccttccataacctcaggtcttacaacaactatgtcacaaacaacaacaaca

SEQ ID NO: 52331 - DNA, 384 bp, Glycine max
  Clone ID: LIB3167-024-P1-K1-H9
gttcctacccaacttgaggaagccttgaaacagggcattgcaaatcagccagtggccgtacctattccagcagacgactatgaatttcaatattatacatcaggtgtattcaaagggaaatgcggtacagaattaaatcatgctctcctgcttgtggggtatggtacagaaaaagatggagattattggatagcaaagaattcatatagtgataaatggggagagaatggctatatcagaatacaaagaaaactgagcacttgtaaatttggaaacgggggttactatcccattataaaagtcaccgatcaacaagccaccaaatatgtgtgacaatggcatcggctagctgtgcccattgagcctttggaagtaattaataac

SEQ ID NO: 52332 - DNA, 377 bp, Glycine max
  Clone ID: LIB3167-025-P1-K1-A1
gaatgataggatgataaaggcttttctagtaacctggcctgctgttcaaccccatgccatcaatggcctagctggacgaatcttctctggatccaagctctctttcaagccctctcgccacagtgtcaaatccaagaacttcaggagtggtgccgtggtagcaaagtatggcgacatgagtgtgtactttgatttggaggatctgggcaacactacagggcagtgggacttgtatggctcagatgcaccttcaccctacaaccctcttcagagcaagttcttccagacatttgctgctccattcacaaagaggggatcgttactcaagtttctgatattgggaggtggatacaccctagcatacttcagtgcaactg

SEQ ID NO: 52333 - DNA, 317 bp, Glycine max
  Clone ID: LIB3167-025-P1-K1-A10
cccacgcgttcgcccacgcgtttttttacgcgtccggtaggctcaatcacaggagacaccaacacattggctggaaatgtgccacccaaggctaaccttggtgacatgaggggactagctggaggcttgaatgggctaaacactttcaccatgattgatggaggaacctttgtcggcgcttaggcatacaaggacagcaaagtcttgaacatgcttacaatgcaagaatttcacataagataccatgttgtaactgggatcacatttgctttccttttacccagttgcatcgtcacatctggcttgttcagagagca

SEQ ID NO: 52334 - DNA, 314 bp, Glycine max
  Clone ID: LIB3167-025-P1-K1-A11
tggtaatactcacaatctggatttctccggaagcaaaccctagcagaaaaaaaaaacgaaatcaattggaatgaacgatccagattgggacatgtgggaggagtggatggggtgggaaggagcaggaatccgtgactactcgtctcatattaatccttacatttgataaatttgttgataattattattagtcttttgaataatgattgtgcattagttaaagtggggtctggtctagagtctagacctacatacatgttcccacccaagtggctggtgttctttgtgtatagtccaagtgaatgtaaagtgag

SEQ ID NO: 52335 - DNA, 378 bp, Glycine max
  Clone ID: LIB3167-025-P1-K1-A12
aagtagttgagaactaagaaggagatgcaaatggcttcctcaatgatctcttccccagctgttaccactgtcaaccgtgccggtgccggcatggttgctccattcactggcctcaagtccatggctggcttccccaccaggaagaccaacaatgacattacctccattgctagcaacggtggaagagtgcaatgcatgcaggtgtggccaccagttggcaagaagaagtttgagactctttcctacctgccagaccttgatgatgcacaattggcaaaggaagtagaataccttcttaggaagggatggattccttgcttggaattcgagttggagcacggtttcgtgtaccgtgagcacaacaggtcaccaggatac

SEQ ID NO: 52336 - DNA, 58 bp, Glycine max
  unsure at all n locations
  Clone ID: LIB3167-025-P1-K1-A2
cggaacgggcgggtcgacccattcgtnaaaaaaaaaaaaaaattcaagatattatttt

SEQ ID NO: 52337 - DNA, 307 bp, Glycine max
  Clone ID: LIB3167-025-P1-K1-A3
gaccgacgcgtccgtaaaaaaaaacatttaaagacaaattttttttttcagccagttattttaatcgggggggccctctacacattccatgctaacgtgccccccaatgctaaccttggtgacatgagtggactcacctaaatgcattcaactgcccgtcctttaaccacgatagatcgaggatcccttgacggcgcctaagcatacaaggacagcaaagtttgcaacatgcttacaatgcaagaattccaaagaggcccgcaccgtacacctttcccaacatttgttcaccctacccaggttgcat

SEQ ID NO: 52338 - DNA, 381 bp, Glycine max
  Clone ID: LIB3167-025-P1-K1-A4
ctgcatctgattcgttcgttcactttcactttaccaactcctaacaatttctctctgtttccttcttcaccgcatcaatggagttggacggcgttctcctcggcatgtgcaaccctctcctcgacatctctgccgtcgtcgacgacgctttcttgcaaaaatacggtatcaagttgaacgatgcgattctcgctgaggataagcacaaacctatgtatgaagaattggctaacaatcctaatgtggagtacattgctggaggtgctactcagaattcaatcagggttgctcagtggatgcttcaagcaccaggtgccacaagttacataggttgcataggaaaggacaaatttggagaggagatgaagaagaaatgtacac

SEQ ID NO: 52339 - DNA, 354 bp, Glycine max
  Clone ID: LIB3167-025-P1-K1-A5
aaaacccggcgggacccacccgtccgttgaatttgattcgttcgtccactttctttttaccaactcctaacaatttctctgtgtttccttcttcaccgcatcaatggagttggacggcgttctcctcggcatgtgcaaccctctcctcgacatctctgccgtcgtcgacgacgctttcttgcaaaaatacggtatcaagttgaacgatgcgattctcgctgaggataagcacaaacctatgtatgaagaattggctaacaatcctaatgtggagtacattgctggaggtgctactcataattcaatcagggttgctcagtggatgctttaagcaccaggtgccacatgttacat

SEQ ID NO: 52340 - DNA, 364 bp, Glycine max
  Clone ID: LIB3167-025-P1-K1-A6
gttgagacctaagatgaaggaaatggcttcctcaatgatctcctccccagctgttaccaccgtcaaccgtgccggtgccggcatggttgctccattcaccggcctcaaatccatggctggcttccccacgaggaagaccaacaatgacattacctccattgctagcaacggtggaagagtacaatgcatgcaggtgtggccaccaattggcaagaagaagttcgagactctttcctacttgccagacctcgatgatgcccaattggcaaaggaagtcgaataccttctaaggaaaggatggattccttgcttggaattcgagttggagcacggtttcgtgtaccgtgagcacaacaggtcacct

SEQ ID NO: 52341 - DNA, 379 bp, Glycine max
  Clone ID: LIB3167-025-P1-K1-A7
cggacgcgtgggttcaggataccaatctttgtgaggaattctggacaccccttcatggtacactgctggagagttggagtacttcacagacactaccacactcttcgtagttgagctctttttcattggttgggccgagggtagaaggtgggctgatatcatcaagccaggctgtgtcaacactgaccctatctttcccaacaacaagctcacaggaactgatgttgggtacccaggtgggctttggtttgatccacttggctggggaagtggttctcctgagaagatcaaggagttgagaacaaaggagatcaagaatgggaggttggccatgttggctgtgatgggggcatggttccagcacatttacactggcact

SEQ ID NO: 52342 - DNA, 221 bp, Glycine max
  Clone ID: LIB3167-025-P1-K1-A8
ccacgcgtcgcacgctcgttattgtggactcgtcttccgcgtattctttttgtgttggtgctgtttttctctcacctgaaaatgcttgtgggggtaactgggttgcgagccctgagtgcgacgctgcggctgagagtcccagactgactcccggtcaaccaccaccgaacctgtatggagtggcccattaagtaaccaggtgcgaagggtgtccgtgagaa

SEQ ID NO: 52343 - DNA, 389 bp, Glycine max
  Clone ID: LIB3167-025-P1-K1-A9
cccacgcgtccgcccacgcgttcgtccacgcgtccggtaggctcaatcacaggaaacaccaacacattggctggaaatgtgccacccaaggctaaccttggtgacatgaggggactagctggaggcttgaatgggctaaacacttcagccatgatagatggaggatcctttgacggcgctaaggcatacaaggacagcaaagtctgcaacatgcttacaatgcaagaattccacagaagataccatgatgaaactgggatcacatttgcttccctttacccaggttgcatcgccacaacaggcttgttcagagagcacattcccttgttcagacttctcttccctccattccaaaagtacataaccaagggctttgtctcagaagatga

SEQ ID NO: 52344 - DNA, 61 bp, Glycine max
  unsure at all n locations
  Clone ID: LIB3167-025-P1-K1-B1
naaaaaaaaaaaaaaaaaaaaaaaataaataaaaaaaaaaaaaaaaaaaaaaaaaaaaaaa

SEQ ID NO: 52345 - DNA, 377 bp, Glycine max
  Clone ID: LIB3167-025-P1-K1-B10
tctaaagaaggatatagttttgaagagatatgcatcaagaaagaagcgtttgagggagaagagaagttttgtgcaaaatccttgggaacagtaattggttttgccatttcaaagctgggaaagaacattcaagtactttcaagttcctttgtcaataagcaagagcaatacactgtggaaggagtgcagaatcttggagacaaagcagtgatgtgtcatgggctaaatttcagaactgcagtattttactgccataaagtccgtgaaacaacagctttcatggttccattggtggctggtgatggaaccaaaactcaggcacttgctgtttgccactcagatacttctggaatgaatcatcacatgcttcatgaact

SEQ ID NO: 52346 - DNA, 324 bp, Glycine max
  Clone ID: LIB3167-025-P1-K1-B12
cccacgcgtccggaaggtggtggctgaaactacctgttgatgttgtcaatgatcctctatcactggcttcttccagttatatggaaccatcaatgtttttatctttcacagaggctttagttaagcaactgtgcgttgagcggttggtagagagctcatattgcggattgtgtatttgctttattatactttttttttaatgctggtataagaggttttgtgataacggtggtatccagttaattaggaatggatacatatacagcagagacaaacctttctgtttattaccctggcttttataatagcaatactagatgattc

SEQ ID NO: 52347 - DNA, 396 bp, Glycine max
  Clone ID: LIB3167-025-P1-K1-B2
cgtccgaaatctggctctcggcttcctctcgttcagggtttcccctcgtctccgagctcgtttcgttctcgaagaatcgatctgcgataatgactcgcggtaaccagagggatcgtgatcgcgaaagggctcaggctagaaccggtggtaaaggcaagcagaaagatgatgggttgacccctgaacagcgcagggaaagagatgcgaaggcgttgcaggagaaggcggcaaagaaagcggcacaggatgcaggagggaataatgcaggtggaaccaaaaaataggcaataattcaatgagtggtttgagttcgacattgttgtttgtagacatggaatttatggaaaatttatgttgcgttattcgtggagtatgatgtgtttattaatgtaattt

SEQ ID NO: 52348 - DNA, 400 bp, Glycine max
  Clone ID: LIB3167-025-P1-K1-B3
aaaaaaaaaaaaaaaaaaaaaaaattttaataaaaaaaaaaaaaaaaaaaaaaatagaaaaaaaataaaaaaaataaatataaaaataaaaaaataaaaaaaacaaaaaaaaataaaaaaaaaaaaaaagaataaaaataaaaaaaaaaggggggggcccttttaaaggttcaaagttttacccccggtcattgcaaggtaaaagtttttttttggggtcccctaaattaaattaatgggccggggttttaaaacgtggggcttggaaaacccttggctttcccaaatttaatggttttgtgaaaaatccctttttgacattgtgggttattaacaaagaggccctccccaatctcctttccaaaattttgccaaccttaaatggcaattggcacccccc

SEQ ID NO: 52349 - DNA, 372 bp, Glycine max
  Clone ID: LIB3167-025-P1-K1-B4
cccacgcgtccgaacaaatcaaagccatggccacctccaacttctctattgttctctccgtctccctagccttctttttggtgctacttaccaaggcacactcgaccgataccgtttctttcaccttcaacaagttcaacccagtccaaccaaacattatgctccaaaaagatgctagtatttcatcctctggggtgttacaactcaccaaagttggcagcaacggcgtgcccacctcgggatctctcggtcgtgccctttacgctgccccaatccagatttgggacagcgaaaccggcaaggtagccagctgggctacatcctttaaattcaacattttcgcacccaacaaatcaaactcagctgacgggc

SEQ ID NO: 52350 - DNA, 188 bp, Glycine max
  Clone ID: LIB3167-025-P1-K1-B5
gtgatttgtttggttcaaaaaaaatttttaacaactaaaactaaaatataaaaaataaacaaatacataacactaatataaaaaactacttaccaataatctaatcaaccaatacaaaaaaataagggccgccccttttaaaggatccaaccttccttaccctttcttccaacaaaataccttttttt

SEQ ID NO: 52351 - DNA, 142 bp, Glycine max
  Clone ID: LIB3167-025-P1-K1-B6
atggtcctttccaaacttaaaaatgttaaacgcctgtattaatccaacaaaaaatgggcctttgaaactaaagaaaaacaaactaagattggcccaaactgaagaaatacaaaaaaatggcttgagatcaagcctaaccacg

SEQ ID NO: 52352 - DNA, 385 bp, Glycine max
  Clone ID: LIB3167-025-P1-K1-B7
cccacgcgtccgcccacgcgttcggtgagctataagctagtttatcgtgaggagaatatgaagttgtttgttttctttgttgctgcagtagttttggtagcatggccatgccatggcgcaggctaccaaaggttccctctccgaatgaaaactggctatggtgagcgttcttcggaggtaaaatgcgcaagttttaggcttgctgtggaagcacacaacatccgagcctttaaaaccattcctgaagagtgcgttgaaccaacaaaggactacattaatggcgaacaatttagatcagactctaaaacagttaaccaacaagctttcttttatgctagtgaacgcgaagtccatcacaacgacatatttatattcggcatagata

SEQ ID NO: 52353 - DNA, 385 bp, Glycine max
  Clone ID: LIB3167-025-P1-K1-B8
cgaaaccctcttcatcttgttctatctgtgacgagcatcatggcctcaagagcagtgttattgttggctatgtgtgtgcttccggcgatggttgtggccattcgcccagcaaagaaccctttttgcgtgaagggtcgtgtctactgtgacccttgccgtgctggttttgagacctcagctaccacctacattgctggtgctgagattatgttgcaatgcaagagcagggttagcaacgaggttgtgtacacgaagaaggggtacaccgactcaaccggagcatacacaatgtacgtggatgaggatcacgcagatcagatctgcagtgccaagcttgtaagcagccctcaccctcaatgcaaggaagtcaccccaggccgcgacg

SEQ ID NO: 52354 - DNA, 328 bp, Glycine max
  Clone ID: LIB3167-025-P1-K1-B9
cagagagtgatttcagtgagtgatcggtgttcacttgatctcatcataatcgtcagcgtcaattgaagaagatgccgatcagaaacatcgccgtcggaaggcctgaagaggcgactcaccccgacacgttgaaggcggctttggctgagttcatctcaaccttcatcttcgtgttcgccggctcaggctccggcatcgcctacaacaagctcaccgacaacggcgctgccacccctgccggcctcatctccgcctccatcgcccatgcattcgccctcttcgtcgccgtctccgtcggcgccaacatctccggcggccacgtcaaccc

SEQ ID NO: 52355 - DNA, 397 bp, Glycine max
  Clone ID: LIB3167-025-P1-K1-C1
cccgtccgaaccaatcttttttccacgccctttttgtttaaccgtctgaagtgcaccaatggcagatggattgcattcgcagcatccatcggtagttcagaagttatctggacagtcttatcttgtgtccaggcttgctcctaatcactccagaaactgttctaccactggtagttacttcaatggaggtttgcagtcttcaggtttggttccagtcacggcacacgcgccggctgagaaaggggtgtctggatttttgttggatttcctgatgggcggagtgtcggcggctgtgtccaagacagctgcggctccaatcgaacgagttaagttgctcatccaaaaccaggatgaaatgatcaagagtggtcggttgtctgaaccatacaaaggaatt

SEQ ID NO: 52356 - DNA, 261 bp, Glycine max
  Clone ID: LIB3167-025-P1-K1-C10
ctttaggtgtccctgctcctccttttacatacgtggctcacgctctggcagggtgagccagcgactaggtcgtggactagctcgacaatttcaagggtggcttgacttgccattctgattacaagtccctcatttataacattcatccaacgcttattgctattggcttactaggtcatgggggtgaaactattattagtgacaaagctttttccacaaagaattaagtgcacaaagtgatacaccttgttttccatgcca

SEQ ID NO: 52357 - DNA, 377 bp, Glycine max
  Clone ID: LIB3167-025-P1-K1-C11
gctaatgcagcttcatggtactgtgcctttgttctcgtggccctcgcgctcctaagcatgttcaaagacagctccatgcttattcctagtcaatatgccagcggccaactattgtcacggccatgcgaggaaatctatgttgtcggagaaggtgagacgcttcacacaatcagtgacaagtgtggtgacccttttatagttgagaacaaccctcatatccatgaccctgatgatgtcttccctggcctcgttatcaagattacaccctcacttcgtacctagaaattaaggttgttatataaggaaaaatcaattttcctatccatgtgagagagaaataacatccttttcttgtcattaccttctctcttctattt

SEQ ID NO: 52358 - DNA, 378 bp, Glycine max
  Clone ID: LIB3167-025-P1-K1-C12
cccacgcgtccgatttattattatgttcctttgtggcagtgtggaaagagttgcaaaaggagaacaaggagttctttcgagcatatttgcaagttgtcactcccaggccattattcatgagtagatgttttcaaaggagaccaaatttggcaagaaggaaacactggaaatgattaatagtggctgaataaccctacaagggaaaagtgagctggattactctgtcaccatatagttaaagatgcatcagggaatattagtgatgactaattatagcacaagaaagttatttggtcagtatctctctaaggatttgtgggtgcagaccctcgttcctagcacatatatagtggccaatggttgtagttccttaatact

SEQ ID NO: 52359 - DNA, 315 bp, Glycine max
  Clone ID: LIB3167-025-P1-K1-C2
cccacgcgtccggatccattaagtgtgagtaggcattttgtcctctcaagtccactagagcaattgtcttcatttcatagggaattctgtagaaaaattatagtaattttgcagttcttttgtgtactataagggaagctgggttgggtgggtttctggcttccagagcaacttgttagatggcaaagggtgcttttggggataacgtctgtgtactaccatctctttaaccaaactcttgcaatactttttggtccttatgaacattcttcaacatgtcaattttctaccggtgtcaacatttaagttttccat

SEQ ID NO: 52360 - DNA, 392 bp, Glycine max
  Clone ID: LIB3167-025-P1-K1-C3
cccacgcgtccgcccacgcgtccggagaacaagactaccactgctgaacctcctccagctaatgatccagcaaaaccacctgcaaaggcacaagtggtgggttggccaccagttaggtcatttagaaagaacatagttcaaaggaacagcaatgaagaagaggcagagaagagcacgaagaatgctttcgtgaaggtgagcatggatggtgcaccgtatctacgaaaggtggacataaagttgtacaagagctaccaggagctgtcagatgcgctggctaagatgttcagttccttcacgattgaaaagtgtgggtcccaagggatgaaggactttatgaatgagaccaatggctctgactatgtacccacatatgaagacaaggacggaga

SEQ ID NO: 52361 - DNA, 329 bp, Glycine max
  Clone ID: LIB3167-025-P1-K1-C4
cccacgcgtccgcccacgcgtccggaaaggagaggagattgcaaagagaatcaaagagatgatgaacaatgaatctctgagggtcggtaagagctgcagaaatggaggcagctaggaaggcggctggtggtgttggggggagttgccgaggatattattaacaggcaaattgagcactcgaactggtattctcaagcaccttagatatcgagaccgtgtattcatcagtgtgcacacgctaatgggcaacaagttgcaatggagtccaaagccatatactaaaatgcttacttctatgacggagacctagaagtgcatcccaaggacac

SEQ ID NO: 52362 - DNA, 364 bp, Glycine max
  Clone ID: LIB3167-025-P1-K1-C5
cgcacgcgtgggacctcgggttccattggcccagccatgtccaaggcgcgtgtctacaccgttgtcaacgtactccgacccaaagagtactgggtttactagtgtctgaccgctcaatggggtgatcaagatgattatgaggttgtgcgcaaagagggaaggggaaagtacagagaggtttttgaaggcataaacgttcatagcaatgagcgctgtataatcaatattcttaagcctgtcaagagaaagactatttaaagagagatagaaatacttcagaacctttgtggtggtccaaatatcgtgaagctgcttgatattggcagagatcagcactgtaaaactcctagcttaatatccgagt

SEQ ID NO: 52363 - DNA, 385 bp, Glycine max
  Clone ID: LIB3167-025-P1-K1-C6
cgtccgcccacgcgtccgaaagcaaaaagaatgattcccaggcgaggagaaagatggaggggaaggagcaggatgtgtcgttgggagcgaacaagttccccgagagacagccaattgggacggcggcgcagagccaagacgacggcaaggactaccaggagccggcgccggcgccgctggttgacccgacggagtttacgtcatggtcgttttacagagcagggatagcagagtttgtggccacttttctgtttctctacatcactgtcttaaccgttatgggagtcgccggggctaagtctaagtgtagtaccgttgggattcaaggaatcgcttgggccttcggtggcatgatcttcgccctcgtttactgcaccgctggcat

SEQ ID NO: 52364 - DNA, 387 bp, Glycine max
  Clone ID: LIB3167-025-P1-K1-C9
ctttaggtgtccctgctcttccgttgacatacgtggctcacgttctggcagttgttgccagcgtcttaggtcgtggactgggtcgacaatttcaggggtggcttgacttgggattctgataacaagtccctcatcttcaacattcatccagttcttattgatattggcttactagttcatgggggtgaagctattataagttacaaagcttttcccctaaagaaggaagtgaataaattgatacaccttgttttccatgccatcgcattaatacttggaatagttgtgatttatactgccttcaagtgtcacaatgaaagtggcattgccaatctctacagcttgcattcatggcttgggattggcgttattgtcctttatggcatt

SEQ ID NO: 52365 - DNA, 386 bp, Glycine max
  Clone ID: LIB3167-025-P1-K1-D1
cggacgcgtgggttggggcaatggctgttgcacaagtgttttcatcagtgtattttagtgcatggtcaaacaagtcatactttaggcctcttgtattcagtagcatagttctttttcttggaaatatcttgtatgccttggcatatgatgttagttcaatatggattctcttaattggtcggctgttatgtggatttggttctgccagagctgttaaccggcgatatatcagtgattgtgtgccgttaaaaatccgcatgcaagcatcagcaggttttgttagtgctagtgctcttggaatggcttgtggtcctgcattagctggcatactgcaaattaattttaaaatttccaagcttacatttaatcagaataccttgcctggg

SEQ ID NO: 52366 - DNA, 378 bp, Glycine max
  Clone ID: LIB3167-025-P1-K1-D10
aaaaaagctgaaaagcgcgagagaacgaggtctgaaacttatagcactagcacgcataattgttggagctcctaaccagacgggactcctccctagctccgtccacgcgccgccgtacgctctgaaatcttccgtcgtctccgccatctccgctgccagcctttcgatctgtcataccaaatggccaacagagttcaaattcctaccaacaattcagccctcattgctatgattgcagatgaggatactgtagttggatttctgttggctggagtgggaaatgttgacatacgtaggaagacaaattacctcattgtggattcaaaaacaactgtcaaacaaattgaggatgcattcaaagaatttacaacaagggag

SEQ ID NO: 52367 - DNA, 366 bp, Glycine max
  Clone ID: LIB3167-025-P1-K1-D11
cccacgcgtccgggtgaaagaaagtcttccctgagactgaacatcaaacacttgaaatgcatggtggggggtggggataagaaagtgaacccactgttgaacgaatttcctggtttacagaaatgggctgcaaaggttcatagcatcctcatcctacttcatatgaagaagaataaataaaattttaaatggggggtggagtgaatgcatcattttgtttcttcagctccaatacatattctacagtcaaaataggttttattaggtcaaagttccacacaattgtcatattgtataacgtctacattttacttaagaggatcttatgtgtattttttaaaccaattattaataatatctttcttc

SEQ ID NO: 52368 - DNA, 375 bp, Glycine max
  Clone ID: LIB3167-025-P1-K1-D12
agccaacacctatgccttttcttctaggagattctccttgaagcaccaaaagagcagtaagagaaggttttctttgttcactgttagagctgattctgatgactctgactgcaatgaggaagagtgtgccccggataaggaagtagggaaggtcagtgtggaatggttagctggggagaagacaaaagtagtgggcacattcccacctcgtcgtaagccgggttggactggctatgttgagaaggacactgctgggcagacaaacatatattcagttgagccagcagtttatgtggcagaaagtgctataagttcaggaactgctggctcttcttctgatggagctgagaacacagcagcaattgttgcaggcct

SEQ ID NO: 52369 - DNA, 386 bp, Glycine max
  Clone ID: LIB3167-025-P1-K1-D2
cttccgccaacccttccgaagttccaaagattttaggcatttttttaatcgaaattggaagcgaggaaggaaaatcgaaatcgaaaatggcagtaatggagaggttgaagatgttcgtcgttcaagagccagttgtcgccgcttcctgtctcatcgctggcttcggtctttttcttcctgcttttgtgaggcccatgttggattcatatcaggcaaccaagcaacctcctcaacctgctttaagcgatgtggttgcaggtatgactggaaaaaagtaaaggtgatttacttgacagatacaagtgcaaatttgctaatttccttgtttgaacttattctaattctcaaatgtgagagaaataagagtactgaatattggatctagc

SEQ ID NO: 52370 - DNA, 386 bp, Glycine max
  Clone ID: LIB3167-025-P1-K1-D3
cccacgcgtccgatcgagataactagaaacagtgtgatgaaaatgaaggtccttgttttcttcgttgctacaattttggtagcatggcaatgccatgcgtacgatatgttccctctccgaatgaacactggctatggtgcccgtactccggaggtgaaatgcgcaagttggaggcttgctgtggaagcacacaacatctttggctttgagaccattcctgaagagtgcgttgaagcaacaaaggaatacatccatggcgaacaatatagatcagactccaaaacagttaaccaacaagcttacttttatgccagagacctcgaagtccatcccaaggacacatttgtgttcagtatagatggcaccgtactctctaatattccata

SEQ ID NO: 52371 - DNA, 151 bp, Glycine max
  Clone ID: LIB3167-025-P1-K1-D4
gccaggcgtacgaaaagaaccaccttaaataggtctaggtacaccatcgatcgggcggtctatgaggcttgtatcgaagtacgactgatgattcctatacaaaccctttataggctagtacatctacaccctacaataagggcccgttaca

SEQ ID NO: 52372 - DNA, 384 bp, Glycine max
  Clone ID: LIB3167-025-P1-K1-D5
gcgtccggtttatcccttcaccttcttcctccttaaaccctatcacactctccctaaaccctaaatccccaacatctccgccgcagcatttcaatctcgactttctccggcaccggcgccggaggcctgcttccactctgcggtgctccgcctcctcattctcggagaagcaccacacgaactcctcgaactccgacgacgtgttggagctccctctgttccctctccctctggttctcttccccggcgccatccttcccttgcagatcttcgagttccggtaccgcatcatgatgcacacgctcctccacaccgacctccgattcggcgtcatctacaacgacgccgtctcgggaaccgccaacgtcggctgcgtcggcgaag

SEQ ID NO: 52373 - DNA, 377 bp, Glycine max
  Clone ID: LIB3167-025-P1-K1-D6
tggagacacagatcatagtgatcattttttaatttctcagatttatccgacgtcgctgcagatccaccaaccgttatggctgccttcagcggtgatgaaacggcaccgtttttcggcttccttggcgccgcagctgccctcgtcttctcctgtatgggagctgcctatggcacagcgaagagtggcgtgggcgtggcttccatgggtgtaatgagacctgagctggtgatgaagtcgattgttcctgttgtcatggctggagttttgggcatttatggccttattattgctgttattatcagtaccggtattaatccaaaggccaaatcctattacctctttgatggttatgcacatctctcttctggtcttgcctg

SEQ ID NO: 52374 - DNA, 289 bp, Glycine max
  Clone ID: LIB3167-025-P1-K1-D7
gccacacgtacgcaatcgtgatcttttaataatttctcagatttatccggcggggatgcagatccatctactcgttttggtgactacaatggccatgagacagccccttgtttcggcttctttgaccccacatctgcgctccgacttctatgtatcggagctggctatggtacaccgaatagcggagtgtacagtatgtttcattgacaaaacgagacctgcactggtggtgtagaccattgttgctgtttccatgagtggagtaatgggcatgtacgtcatcatgact

SEQ ID NO: 52375 - DNA, 382 bp, Glycine max
  Clone ID: LIB3167-025-P1-K1-D8
cccacgcgtccggtgagtttgttgatcgagataactagaaacagtgtgatgaaaatgaaggtccttgttttcttcgttgctacaattttggtagcatggcaatgccatgcgtacgatatgttccctctccgaatgaacactggctatggtgcccgtactccggaggtgaaatgcgcaagttggaggcttgctgtggaagcacacaacatctttggctttgagaccattcctgaagagtgcgttgaagcaacaaaggaatacatccatggcgaacaatatagatcagactccaaaacagttaaccaacaagcttacttttatgccagagacctcgaagtccatcccaaggacacatttgtgttcagtatagatggcaccgtac

SEQ ID NO: 52376 - DNA, 324 bp, Glycine max
  Clone ID: LIB3167-025-P1-K1-D9
cccacgcgtccgtgaaaattgaaaatataagcataatttcacctacaatttcatatatactactcaaagtggaactataaactatatatatatatatatatatatggccatttctatgttttgggcagcacctactacagttgggttgtcactagactaataccatcttgttctctaccatgaaattagttcaattattaatttcatgaagaaacctatatgttactccctttcctaaacaggtatgagaggggtgttctactaattagtcaattatctttgtcattgtactttttttagttttatatataatgaagttatttt

SEQ ID NO: 52377 - DNA, 377 bp, Glycine max
  Clone ID: LIB3167-025-P1-K1-E1
tccgcggaaaagcaccgtcgaaccttccttgaggcttctcttgtctgtcgcgagtgaccatggtgagggttagtgtgctgaacgatgctctgaagagcatgtacaatgctgagaaaaggggaaagcgccaagtcatgattcggccatcctccaaagtcattatcaaattccttttggtgatgcagaagcacggatacattggagagtttgagtatgttgatgaccacagggctggtaaaatcgtggttgaattgaacggtagactgaacaagtgtggggttattagtccccgttttgatgtcggcgtcaaagagattgaaggttggactgctaggcttctcccctcaagacagtttgggtatattgtattgactacc

SEQ ID NO: 52378 - DNA, 377 bp, Glycine max
  Clone ID: LIB3167-025-P1-K1-E10
ctcgatgatgcccaattggcaaaggaagtcgaataccttctaaggaaaggatggattccttgcttggaattcgagttggagcacggtttcgtgtaccgtgagcacaacaggtcacctggatactatgatggacgctactggaccatgtggaagctgcctatgtttggctgcactgatgcttctcaggtgttgaaggagcttcaagaggctaagactgcataccccaatggcttcatccgtatcattggatttgacaacgttcgccaagtgcagtgcatcagcttcatcgcctacaagcccccaggcttctaagtcattgaaaaatttgcaaagcatctgtagccaccccactttgtttgttgtacttaaactacatt

SEQ ID NO: 52379 - DNA, 375 bp, Glycine max
  Clone ID: LIB3167-025-P1-K1-E11
cccacgcgtccgtctctctctctctctaacttccttcacacacctcgccggcggctgcgatgaccgactatttctccggttccgttgaattcggactcaacctctctaagcgagtatactacggcaaaggatcggctccgtcgcctgcgccggcgatgtcgcggtccctttcgaagtcgccggaaggatacctcccgacggcgccgatgtgctacgccgtgatatcggatccggagaaggtggagaatccggacattcggagctaccagccgtacgtgctcggtcagtgcgagcctccggcgctgataccgctggagcttcacggcgtgggcatggaagttgaatgctccttggacacggcgttcgtaacggtct

SEQ ID NO: 52380 - DNA, 318 bp, Glycine max
  Clone ID: LIB3167-025-P1-K1-E12
cgcggtctctggcgaaaataaataatgatctttgaaaagggggttgctcaattgtgatgagcttctgcaggaaaataagaggctgctggtcaaatcaatcagtgaaattgagcgcgagcggcatggcttgcacacgcaagacaagaaatcgattgccgagataaagtaaagtgccaaacaggggcagatgggagctggtcgagttatggctaaagatcttggtagaacaaggcatgacgtggagaaattgtataagctaaaatctcatcttcaaggtgtatcactcagaattcagactttgaaattaacacaagcaat

SEQ ID NO: 52381 - DNA, 379 bp, Glycine max
  Clone ID: LIB3167-025-P1-K1-E2
cttcggccaacccttccgccaacccgtccggttttggtttgcagaaccatcgtcaatactgctccaagttggtaagaacgctcctcctcagatccagacggctgaatactctggaccatcacttagttactacatcaaccagttcaagccactggaaattactgaagtgtccgtgcctagtgaggcagaactatcgtcatctggtcaacttggaagctcgccttccgaaggttcccaagttcaagttgaagctcaagctcctgagacctctagtgtgaacattgtatcgtaagtgtatcatgtggttaccacttttgctacgaaaacatagcaaagaagtttattttgtgtcaatagtatgagtcagtgtatacacaac

SEQ ID NO: 52382 - DNA, 379 bp, Glycine max
  Clone ID: LIB3167-025-P1-K1-E3
gccagcaggagagaaatatcttgttgagttgatttctgatcccaaattgagtttgagtttcagccatggtatctgtttctctgctcttattcctatctttctttgccttctttgcaccctctgaatctcacgacaaagtctcgttggaattgtactacgaaagcttatgcccctacagcgccaacttcatcgtgaatcaccttccaaaaatcttcaccccagatcttgccccaatcgttcacctcaaactcgttccttggggcaatgccaaactccgtgccaacgccacctttgactgccagcatgggccatatgagtgcttgctgaacacagttgaagcctgtgcaattcacatctggcctcaactcagcaaacattt

SEQ ID NO: 52383 - DNA, 380 bp, Glycine max
  Clone ID: LIB3167-025-P1-K1-E4
ggtaggcacaaccaaagcaacaccctaattggcttcagctcctgttcccatggcggggtcactgagctctgttaccaacaacaacaagccttcatccgaagccttcttcaggccactacccctacgccaaccaaagaggaccctcttcaccacgaaggcagtggcaaactccaagcctgaaatcaatgcatctttgaaggagaaggcagatgccggactcacagcagcttctgtgacagcatctatggtggttccggaggtggctcatgctgctggatatgagttctccccttccctaaagaactttctactcagcatctttgctggtggggctgttctagcagccatatttggagccgttattggggtttccaactttg

SEQ ID NO: 52384 - DNA, 376 bp, Glycine max
  Clone ID: LIB3167-025-P1-K1-E5
cccacgcgtccgaaaaactcgagagtttaaggtttggcatttcatttgacgaagagtgagagagtcttatctgtcgactctgatctctgatcgcatcttcattccgaaaatggctgtttcggctatcactggagcgaggctaactctagggatgtctctttcctcttccacgcgatcacgaaccgtcgcaatggccgtatctatcgaccccaagaccgataacaaactcactcttaccaagtccgaggaagctttcgctgcggccaaggagctgatgcctggaggcgtgaactccccagttcgtgccttcaaatccgtgggtggtcaaccaattgtgattgattcagtcaaagggtctcgtatgtgggatatcgat

SEQ ID NO: 52385 - DNA, 370 bp, Glycine max
  Clone ID: LIB3167-025-P1-K1-E6
tttgaatggaattgcatcttgtaagatggcggaggaggagaagccaaatggagaagaacaagtgaaggacaacaacaacaacaacttatacgacgccgttcagcgtctgatcttggagccttccaagatcaaggcctctctcatccctctcttccccgaagcttctagaacctactctcgccaactcctccactggtcccgtcaaggttctcccctccgacgcatcctcttcatctccattgggatagttgcacttgttgctctctcaggacttgttgcttttacgctcttttttctggctgctactgtaaatgccattttcgtctcccttctcatttctttggctgtggctggaggcttcttggttctg

SEQ ID NO: 52386 - DNA, 313 bp, Glycine max
  Clone ID: LIB3167-025-P1-K1-E7
gccacgcgtgcggccacgcgtccgtcgacgcgtgccctttgctgtaagcttgtgattcctttcttgagaattccaagttttcatttctttagggacaaaagattgtgagatagagattggctggaaaaggcgcgggctctgctatcggaatcgatttgggaacgacgtactcttgcgtcggcgcgcggcaacacgatcgtgttgaaatcataggctacgaccagggtaacagtactaccccatgctacgtggctatcaccgacacagaacggttgatcggagattcggcgaagaaccaggtcgctatgaaccc

SEQ ID NO: 52387 - DNA, 248 bp, Glycine max
  Clone ID: LIB3167-025-P1-K1-E8
gccacgcgtactgtgacttatacagtgaccaccacagtaagagtatgcgaaaccatggtgagcaccttattgactaggaagaatcctattacggccaccagattccatgcatgtctcaactctctttatggcctgaaaggtggaccatgcggtgcaggtacacgcatggcctactacaaggtgaaggtcatagaccgctagaatgagaagtatatcaaggatgcacagatgaggcttatactgttggc

SEQ ID NO: 52388 - DNA, 385 bp, Glycine max
  Clone ID: LIB3167-025-P1-K1-E9
gctgctccttcacaggctcctacagttgctgaggctgaacatgttcctgaggctccaaaggatgtggctgaggagaaatctgtaattccagtgccttcttctgatgacaaacctgatgagtccaaggctcttgtcttagttgagaagactcaagaagttgccgaagtgaaaccaactgagggctctgtcaaccgagatgcagtgcttgcaagagttgcaactgagaagagattgtcactaatcaaagcatgggaagaaagtgaaaaatcaaaagctgaaaacaaggctcacaaaaagctttcatccgtttctgcatgggaaaacagcaagaaagctgctgtggaggctgacctgaaaaagattgaagaagaactggagaagaaaa

SEQ ID NO: 52389 - DNA, 386 bp, Glycine max
  Clone ID: LIB3167-025-P1-K1-F1
gctctactctactgcttcaccttctgctctagaaaattcagtggtgatacatggcttcggctactctctctgtagccaaaccagcccttcaggcaaatgggaaaggcttctctgaattctctggcctccgcagctcatcaggcttccttcccttttctagaaaatcttcagaggatttccattctgtcattgccttccagacctatgcagttggaagcagtggaggatacaagaagggtgtgacagaagcaaaactgaaggttgccataaacggatttggaaggattggaaggaacttcttgaggtgctggcacggtcgcaaagactcccctcttgatgtcattgccatcaacgacaccggtggcgtgaaacatgcctctcacctt

SEQ ID NO: 52390 - DNA, 376 bp, Glycine max
  Clone ID: LIB3167-025-P1-K1-F10
gtcactgacctatcttggtagagatttgaagtttaaaccttcaaattaatcaaaccattttaatttgcctttagattctgagtcactgctgctatggcgctacgcgtacttcttgtgttggggatgttgctgatgttgtgccttgttaaggtttcatctgatccaaagatagaagaagaaatactggaagcagaagaagaactgcagtttcccgataacgagccacttatcgtgagagacgcgaacagaaggctaatgcaagatatggattgtggtgggttgtgcaagacgaggtgcagtgcacattcgaggcccaacttgtgcactagggcgtgtggcacgtgctgtgtgaggtgcaagtgtgtcccacctggta

SEQ ID NO: 52391 - DNA, 376 bp, Glycine max
  Clone ID: LIB3167-025-P1-K1-F11
ggatacgacgcttccgtatgcaaatctcgctgggaaaaatcaactttctgtccagctggggaatatgaatacattgatgtgataatgggaaaggagcgggtggtggttgacgttgacttcagatcagaattcgagatagctcgacccaccaagacctacaaagcgatcctccaaacgctgccttacgtattcgttggcacgtgcgagcggttgcagagtatcgtggccatcgcttcagaggcggcgaaactgagtctgaagaaaaggggcatgcacgttccgccgtggagaaaagtcgaatacgtcaccgcgaaatggctctccccttacacgtgctcgcgcggggtgaaagaggaaacagaagagaaagagcacc

SEQ ID NO: 52392 - DNA, 352 bp, Glycine max
  Clone ID: LIB3167-025-P1-K1-F12
cccacgcgtgcgcccacgcgttcttttggctggcgaatcaacaccacattcacctgagctttctgtgaggattccaaagcatggcttcccttgccgcatccactgctgctgcttaccttggcatgacagaaatgcttggaaaccccatcaacctcagtggagccacaaggacaactacatacgcctctagccctgacttcttcaagactgtagctcttttctgcaaaaagaaggctgcacctacaaaaaaagctgcacactgctgctcctgccaatgatgagcttgccaagcggcatggtcctgacagactgatcttcttgcctgagggtctcttggaccgagctgagatcc

SEQ ID NO: 52393 - DNA, 382 bp, Glycine max
  Clone ID: LIB3167-025-P1-K1-F2
gtccaccccattatttgccttctcattctcatcactaacacacaagtgtgtgtggtagatttctcagcttgcaacatggcttccatcatcatgtcatttgctccagcaactggtagagtctttgcagccacagcggcaaagggtgctggtggaagcaaagaagagaagggtcttcttgattggatccttggagggttgcagaaggaagaccagctgctagagactgatccaatcctcaagaaggtggaggagaagaatggaggcaccaccagcaacactggccgcaacaagaactctgtggcagtgccacaaaagaagaaaggtggctttggaggcctctttgcgaagaactgaaggagcagtgatttattaccttatattt

SEQ ID NO: 52394 - DNA, 385 bp, Glycine max
  unsure at all n locations
  Clone ID: LIB3167-025-P1-K1-F3
cccacgcgtccggcggaccgcatgtcccaaccatcccgtgcgattctcatattttacaaagtgaatggaatagattttgaggatgtcaaagtcgatttatccaaacatcaccagctatctccccaattccgagccattaaccctttaatgaaagtccctgctgttgttgatggaaggttcaagctatttgagagacatagattttgtgcaatggctgaagagagacaagtcatcggcgtccacaccggtgatgcgtggaagggcaactccagaatgcaaaagactccaaaaaactgcactggcagaggaaagacttttgatatgagaaacgatagagagagaacaacagggtgtggaggtgggagtggctcangaaaggacaaaa

SEQ ID NO: 52395 - DNA, 376 bp, Glycine max
  unsure at all n locations
  Clone ID: LIB3167-025-P1-K1-F4
cacaaacacctcgtccgtcacaatgcagctagctgtggcggccaacgctgtcgtttcaccgtcgccgttccgacctcatccccttctccggtcatccttctccggcgtctccgttaagctcactccccaatccataacgttttcacgcttgaagcccctcaccgtcttcgccgccaccaagaaggccgtcgctgtcctcaaggggacctccgccgtcgaaggcgtcgccactctcatccaagaagacgatggcccgacgacagtttctgttagcatcactggccttactccggngcttcatggttttcacctacatgagtatggtgataccacanatgggtgtatatcaacaggagcacattttaatcctaataac

SEQ ID NO: 52396 - DNA, 374 bp, Glycine max
  Clone ID: LIB3167-025-P1-K1-F5
tgcagattacaaggcagcaagtagagctctggacttcttctttggttggtattctgatccggttttctatggtgactatccggagagtatgaaatcttcagtaggttctaggctcccaaaattcacaaaagctgaatctgaaggtctaaaaaattccatagattttcttggtgtgaattactacaccacttattatgcggaacatgctgaacctgtcagtgccaaccgaaccttctacacagacatactagccagtctcagtacggaaaggaatggtctacatgttggaaccccgactgatttgaattggctctttatctttccaaagggaattcatcttcttatggcacacatacaggataaatacatgaatc

SEQ ID NO: 52397 - DNA, 368 bp, Glycine max
  Clone ID: LIB3167-025-P1-K1-F6
gaaacaaggattcctttctcctccaaatacaatggaaagcaaccaatcggcaaaagagatcacggtggaagtagaagagttcgaggacttgctgcccgtgatggcagagaagttggatgtggagacctttgtgtctgagttgtgtgggggtttcaagcttatggctgacccagaaacgggtttgatcactggtgagagtcttatgaggaactcatctatgttgggtatggatgggatgagcaaagaggtagccgaaaccatggctagacagggagatcttgatggggatgggaagctcaatgaaactgagttctgcatccttatggtgaggcttaatcctgtgatcatgcacgatgctgatacatgcc

SEQ ID NO: 52398 - DNA, 351 bp, Glycine max
  Clone ID: LIB3167-025-P1-K1-F7
cccacgcgtccgattccactgcggttactgacgaatctcttatcttcttctgcttcctaaatgtgagttcattcatttgatgttgcaacttaaagttttgttttgtttgaaattgaaatagtgaagtaaaatggagtctggagctggaggcctagtgtcgtcgtctgagaaagaaggagcctcgtatacctattgggttaggaaaataacggaagatgcagcgcctttgcctctgcctcgtaagctcaacccagaagatcttcccccttcccaatctcaatcttccacgcttgcttcagcttggaatcgcgctgggacatgggaggagaaaagtctaagcaattgggcaac

SEQ ID NO: 52399 - DNA, 381 bp, Glycine max
  Clone ID: LIB3167-025-P1-K1-F8
gtggattgcgaccacgtgtgtgatctagaagaatatggagcgtgtgactcgggctgtaatggtgggttgatgaacaatgcatttgagtacatacttcagtctgggggagtacagaaagaaaaggactatccatacacggggagagatggcacctgcaaatttgacaaaaccaaagttgcagctactgtatctaattacagtgtggtttcccttgatgaagatcaaattgctgcaaacctagtgaagaatggccctcttgcagttggtatcaatgcagtttttatgcagacatatataggtggcgtgtcgtgcccgtacatctgtgggaagcatttggatcatggtgttcttatagtgggttatggtgaaggtgcatatgct

SEQ ID NO: 52400 - DNA, 61 bp, Glycine max
  Clone ID: LIB3167-025-P1-K1-F9
aaaaaaaaaaaaaaaaaaaaaatattaaaaaaaaaaaaaaaaaaaaggttctggatcgcga

SEQ ID NO: 52401 - DNA, 383 bp, Glycine max
  Clone ID: LIB3167-025-P1-K1-G1
attcctcttaagcttgctactgagtttccacactgcataccttaggtcttccgaattcgaagttaatttgcaagatggctaaggaaaaggctcagatcaacattgtggtggttggtcatgtggaccctgaggaggcaaccaccattaacgagctgaagaagcctgttgtggagaaagaagctccagggcatgccatatgagggcatgcacgtacggcctcggaggggaaccagaaaattatgttaacaaaataatctggaaccctaatgtatcagtgtcatcatcagtgtgtagtttaagctagctttgctatggttacgttctttgagatgagagtcttgatgaacagtaccattctgatgtattgctttccttgaaagtta

SEQ ID NO: 52402 - DNA, 375 bp, Glycine max
  Clone ID: LIB3167-025-P1-K1-G10
agtgtctcaacaagtgatatgcaaagcatgtctctctgtgcttcactctcctccacagcttcacacctcacttcccttgcctccgtctcttcttccacctctccactttcccgcaaattttctctcactttccgggaaaaaaacagaaccccaattgcaccacctcacaagctccccttcttctcagcaaggcctgcccccaccagagtagtgttggtgaagtctcaggccacagcacctgcttcttctgaggctgtgaaggtgacaccggtgccttctgagatgaaggcatgggtgtatggagaatatgggggtgtggatgttctgaagctggactccaatgttgctgtgcctgatgtgaaggaggatcaggtg

SEQ ID NO: 52403 - DNA, 379 bp, Glycine max
  Clone ID: LIB3167-025-P1-K1-G11
ggaagccacggcctccgcaatgagcttcgcccttccctcaacaaaagcccaagcgcaagcccaactcctgacccggcccaccaatccattcaccattccctcccgcagcccagcccaccgccccccgccgcgcctccccaccatccgcgccgcaattccccgcacaaagaaagaggcaacggtggagactgtgcgggagcagctcgagaactgttacctcctcgccggcatcaactacaagggcttcacggtgaagcagttccaggagcttcgaaagacgctcccagaaacaacgaaactgatcgtggcgaagaacacgctcgtttacaaggccgtggaaggcacgccctgtgagacgctgaagccctgcatgaagggc

SEQ ID NO: 52404 - DNA, 403 bp, Glycine max
  Clone ID: LIB3167-025-P1-K1-G2
ccggccggacccacgcgtccggcattccccctggtctgctacctttgtttctcaacctcattctcattttccgggttctctctctctctctctctcatggcgaatctagcacacttctccaagagagccctaagaagcgcacacgcgctcgcaaggcaccacgtgcagccgcagctgctggcagcggaacgcgcttttgcgacggaggcggcgaaatcgatatccccgtcggcggatcgcgtgaagtgggactaccgagggcagaggaagataatcccgttagggcagtggctccccaaagtggccgtggatgcttacgtagcacccaacgtggtcctcgccggccaagtcaccgtctgggacggagcctccgtctggcccggttgcgtcctccgcggcgatc

SEQ ID NO: 52405 - DNA, 98 bp, Glycine max
  Clone ID: LIB3167-025-P1-K1-G3
gacaccaaacaaaggtagttgtgattgcagcaaacaatgggtgtctccttcctctcgacttgcccttccctgcttccactcggtgcttatgatacacc

SEQ ID NO: 52406 - DNA, 375 bp, Glycine max
  Clone ID: LIB3167-025-P1-K1-G4
gttgtgactcgttcttcttcgtcgttatcttcttcttttgttgtttgtgtgtttgttttttctctcacctgaaaatgtcttgctgcggtggtaactgtggttgcggaagcgcctgcaagtgcggcaacggctgcggaggctgcaagatgtacccagacttgagctacaccgagtcaaccaccaccgagaccttggtcatgggagtggcaccagttaaggctcaattcgagagtgctgaaatgggtgttcccgctgagaacgatggctgcaaatgtggagctaactgcacctgcaacccctgcacttgcaagtgaggtgttggagagctaaagcttcaagcagagatggcccttagaaataatgataaaaactata

SEQ ID NO: 52407 - DNA, 380 bp, Glycine max
  Clone ID: LIB3167-025-P1-K1-G5
gttccatctctttccctctcttcaaaaaccatccatcgcaatctcattagtcatcactctctctctctctctaaggcaatgcccttttccttctgcaacgtccttctcctttccactcccttcctttaacaacccctctctcaccaacaacctattcagtattgccccctcatttcccttgctagcatccaaaaatagaatagcccgaagcagaagaaagcttctctgagaagaagtgaagcaaaacaaaacaagaaaagcatgatgtcgagaataaacaacaacggcgttgcctggatgggcgaacgagaagacgaaaactctcgaaaccacaacatcatacccaccgacacaaccacaacaaacacaggtttcgtcga

SEQ ID NO: 52408 - DNA, 392 bp, Glycine max
  Clone ID: LIB3167-025-P1-K1-G6
ggaacgggcggacaacccgtccgcccacgcgtccggggagaaaagaaggtgtttctggaactctgtgaagaaattcttcagagtatggaagtgggaatgtccttcaaagactataatggtagaataagttcgtgggattttcacagggcatccaattatcttgtaactgctagtgatgatgaatccattcgtctgtatgatgttaccagtggaacatgtttgaagacaattaatagcaagaagtatggggttgacctggtttgcttcacatctcattctacaactgtcatttactcttcaaaaaatggttgggatgaatctttgcggcttctatcgttgcatgataacaaatatttgagatatttcaaaggtcaccatgacagggttgtgtc

SEQ ID NO: 52409 - DNA, 299 bp, Glycine max
  Clone ID: LIB3167-025-P1-K1-G7
aatgagtgttgtgtgaggcgactaataacaaaatgatggcggcaacggcaacaaccgtgcctgtgcggtggcaaccaccaaacaccaggtttaggattcaacctcagcctcagatgaagagactgatgacagtgaaagcatttggcaatggtaagggaggcagagatatggatagggtttggagggaggcgtggcgaagtgcgaacgatggatttgagcgctttgtctttgaagcgaagaagactgctgagcgcatcgaccggcgctattctctttcgcggcgtctctcggtcgaggct

SEQ ID NO: 52410 - DNA, 379 bp, Glycine max
  Clone ID: LIB3167-025-P1-K1-G8
cggacgcgtgggggatttcggccgtttgctccccaaggaaagaagcagagtgtttcttttgaaatcagctagaaaaggtgtcaggtgaagaggtagctgttgcagctgaggcacctgctgcttcaattccaggtgagccaatggacatcatgactgctctacagcttgtgctgagaaaatctctggcctatggtggtcttgcacgaggtcttcatgaaggtgctaaggtgatcgagaagcatgctgcacagctctgcgttctagcagaagattgtgaccaacctgattatgtgaaactggtgaaggctctttgtgcagagcacaatgttagccttttgacagttccaagtgcaaagacccttggagaatgggctggttt

SEQ ID NO: 52411 - DNA, 181 bp, Glycine max
  unsure at all n locations
  Clone ID: LIB3167-025-P1-K1-G9
cccacgcgtccggttctagattccagagttacacctcaatttcactctctcctacgcctactttttatccaaatccttcttttgcattcgcttttatgcttatgtgttgtaatttggatgctgcttgtgttttcgagcttcgctatatgtgcaattcttatcattctagctgactgctntc

SEQ ID NO: 52412 - DNA, 382 bp, Glycine max
  Clone ID: LIB3167-025-P1-K1-H1
ggaagagagaaaaaccatggcaataacactcaacaatggcttcaagatgcctatcattggattgggcgtgtggcgcatggaaggaaacgaaatcagggacctaattctcaattccatcaaaattggttatcgccattttgattgtgctgctgactacaaaaacgaagcagaagttggagatgcgcttaaggaggcttttgatagtggccttgtgaagagagaggatctcttcattaccaccaagctttggaattctgatcaaggccacgttcttgaggcgtgtaaagacagtctcaagaagcttcagttaacgtatctagatttatatcttgttcactttcctgttgccgtaaggcatactggggttggtaatacttctagt

SEQ ID NO: 52413 - DNA, 378 bp, Glycine max
  Clone ID: LIB3167-025-P1-K1-H10
ctgctcaaggtacacgcacccacactcacacccacatctgcctctgctcaactgcaatggcgctgcagtgtaagtgtggcacccaccactctggcgtttcccaattcctactccatttctgcggaaagaggaagaagagaatggaattggagggtgaaatgcagcagcagcagtgcggagattgagaaaggggctgcgagttttgggcccgggagcccagtgagagcaaccaacattctggtggttggagcgactggaaccctgggaaggcagattgtgcgacgggcactcgacgaaggctacgacgttaggtgtctggtcaggcccaggcccgctcctgccgacttgcttcgcgattggggagcaacagttgtgaat

SEQ ID NO: 52414 - DNA, 307 bp, Glycine max
  Clone ID: LIB3167-025-P1-K1-H11
gccacgcgtcgccacgcgtctgttaatgttgctgaagtctgattcctttcttcagaatccaagtttcatttcgtgggcaaaagattggagatagagtatggtggaaaaggcgagggtcctgtatcggaatcgatttgggaacgacgactctgctcgcggtggcaacacgatcggttgaatataccacgccaggtacagactacccatctacgtggcttaccgacacaacggtgtcgcgatgcggagaccggtcgcttgaacccatcacctgttttgatgctagcgttgatggagacgtttttgtgca

SEQ ID NO: 52415 - DNA, 379 bp, Glycine max
  Clone ID: LIB3167-025-P1-K1-H12
ctgtttctttctctgaaatggtggttaagggtgagagttcaaaacgctgagtttcgagttcacaacactgagctcaattgttcttaagccgtgcgtgagttgttcaggtcctcaagatgcttgcgctgacagattctcctctacttattgctaaaacatttgaagcaattaaaataccaacaagtacacgaggcactgtgttatgtgctgcaaaaggtcaaagaccaagatatccccgagtttggaagacccataaaaaaattgggaccatttccaaggctgccaagcttgttaactctattaaggagctgtcaaatgtcaaagaggaagtttatggagctcttgattcctatgttgcttgggaattagagttcccttt

SEQ ID NO: 52416 - DNA, 367 bp, Glycine max
  Clone ID: LIB3167-025-P1-K1-H2
aaaacccggcgggaccaacgcgtccgaaaaaaaacaatggcatcctcattttattttgaaattgccttaatgcaacccaccaaggtgttcatggccactcgcatcctaaaatatacacaaagcatccttaaggctaatggcttggaacccgctgctggtaaactcatttgctccgttaagtccgatctcaaagattatgctcaaaaatgcgtcaacgccaccaaaattgcgtgactcgcccttgacagctgatctctcgttgccactggagcgagtgcataatgtgctgcacagaggctaacctgcgacgaaaaccagagcaagacatactaggaagcgaatggaactggatctgctgatcactgcc

SEQ ID NO: 52417 - DNA, 383 bp, Glycine max
  Clone ID: LIB3167-025-P1-K1-H3
cacaagagtgcatcattcctcattttttcctctcttcccccatgaccttccaacgagtccccactctccttctccttctcctcctcgcgtccgcaaattcccattttgccctcgccggaaagcgcaaggttcacatccccgacgagttggacgacgtgttcgacgacgaggaggacgacgcgtggcgagaatggggcaagaaacccgaaccccctttcccttcctccgatatctccaagctcgatccctcgcagatccagcaggagatgatgaagcgccacgccggacccgtcatcggattcgtcaagctccggccagggtctcgccgtactccggacatggtagctgaatttgcaatgaaatggacacatgttctgagaact

SEQ ID NO: 52418 - DNA, 342 bp, Glycine max
  Clone ID: LIB3167-025-P1-K1-H4
cggacgcgtgggtcaaaactcaagcatttcatccctcttgatttgtagtttgttttgtgctttagataaaagttctgccaaatcaagaggggttttaagatcatagtgtgtgttttgcaacaatggctaagttctttgctgctatgatcttggcactctttgccatttccatacttcaaacagtggtaatggctgctaatgaacaaaggggccacttgtattacaacaagagcaaatattggagtgggaggggtaagagttacccatgcccatcacaatgctcgaggagatgtagccagacccaataccacaagccctgcatgtttttctgtcagaagtgct

SEQ ID NO: 52419 - DNA, 101 bp, Glycine max
  Clone ID: LIB3167-025-P1-K1-H5
taagggtgcagaaacgcgcgctgtagggacgcattaagcactgcggcggtggcgtggtactcacagcctgtccggtacactagcgtgaccgctagaaaacg

SEQ ID NO: 52420 - DNA, 409 bp, Glycine max
  Clone ID: LIB3167-025-P1-K1-H6
ggacgacacccgtccgcccacgcgtccggcaatgcggttcagatgatctataaaatcgaagagggatagaaaagagtcagtaattagtgtatgcacaaacacagaaggaatgatgtgaagaacatgctggaccatctaaaaacgcaggatctaacagagatgctctattagataaactcggagacatgaattggccagcgaatgtggaatggatacacaaactctctactgatgttgatcaagagcatgaagtagatgtcaatgatgacttggcacgagaacttgcgttttacacacaggcattggagggaactaaggaagcatttgagaaacttcagtcaatgggtctgcctttcctgagacctgcagactattatgcagaaatggcaaagacagatggccacatgga

SEQ ID NO: 52421 - DNA, 376 bp, Glycine max
  Clone ID: LIB3167-025-P1-K1-H7
aaaacgcgtgggtacacataactttttataaaataaatatatataatatagaggtgtctatatatatactatgacttatactatagcctgtgcgtgtgaaagatcgcagcaactacaccaccatcacaacaggaccgtaaccgatttccaaggtttcttggtgctgctggtgtattatacgcttacatctgcatgtgctggttgagttatttgctggtctaacttaaccatactgtctattttgactcctgagattgctagtgagtcatggggcatagacatttatatagctcatctccaatatttgagggtgaacctgaccagaactggaatcatatgcatatggatcaacaatatgtgaaccatggtaggagta

SEQ ID NO: 52422 - DNA, 378 bp, Glycine max
  Clone ID: LIB3167-025-P1-K1-H8
cggacgcgtgggcggacgcgtgggttcaaaccgacgtcaatggcagcctcaggctccttctccaccctcttctccttcctcctccctccaaagccacaccctcctcccatcatcactcgcttcccactccagaagctacgtgccaagcatcaggaccaggaccaccactcgtcggcggagctgtccgccgtggcgaacccgtcccacgcgcatgcgaacacgctcttcttccggtcggcgtacaacgtgcaggtggtggtggacgagaacgagccggaggagaggctcctcaaccggttccggagagaggtcatgagagccggagtcattcaggagtgcaagcggagacggttcttcgagaacaagcaggaggaaaag

SEQ ID NO: 52423 - DNA, 383 bp, Glycine max
  Clone ID: LIB3167-025-P1-K1-H9
agttaatagacgtgccaagttcctctgtgttctctttgcctcgacactctgcattcaagttccataatggcagcaaccatagcaacaacaatggctatgatcaactcaaagtgcatcaacacaacagggtcatcacacaagttgcacaaccccaagctcccaccctcaaaacccaccctctcccttttctcccttcagaacctcccaaagggcctaacctcccacgtctcaacttccacagcaggcactgccatcgcaggcgcaatattctcctcactcgcaaactgcgacgcagccttagctgcatcgcaaattgctgaattagccgaaagtgataaccgcgggctggcattgttgttgccgttgattccagccatagcgtg

SEQ ID NO: 52424 - DNA, 271 bp, Glycine max
  Clone ID: LIB3167-026-P1-K1-A10
gttgcaccgaacagcttcacttacactctactccaaaatggcggtgtcacgcgttcttcgatcgcgctgtcgatccctaccaaacctgttcaccagaacatttcgcaccaacctgcttaatcgcgcttcaagctggtcaaatctagttacggcccgcgcgcggtcgcctgggccggtgggtcggccgcgcaagacccgactgtcgatcgacacaagttcagaagaaaatactctgacacgaggtcatgaaaggggaggattgttattgtgc

SEQ ID NO: 52425 - DNA, 379 bp, Glycine max
  Clone ID: LIB3167-026-P1-K1-A11
cccacgcgtccgcccacgcgtacgcaggatcagagttagctaagcttgaaatggctgttttcattcaccatctcattctcaactaccattgggaattggctgatacggatcaagcttttgcctacccttttgtcgacttccccaaaggcctacccattagagtccaagcccactctttgctttgagaaaaattacttagtaagttcaccccaaatatgtaataactccaagcctagccaataacagagtcacaccttgatctaaatcaaactacttgaagaatttgaagttcctagctccaatggcattccatacaaatcaaaaatatttccgactttctcgcgtacaaagggaagagaaaaatattaagtacaattgg

SEQ ID NO: 52426 - DNA, 377 bp, Glycine max
  Clone ID: LIB3167-026-P1-K1-A12
cagcgttgttgcattgtagaaggcgatggccgcgcgagctctgttgaccagagagaaccctagccaccgtgctccgcaacgacgcgaagcccataatcggagttggcataacagcagcggctactcattcacgcgggttgcacgtgtacacgctacccgatctggattacgactatggcgcactggagccagccatcagcggcgacatcatgcagctgcaccaccagaagcaccaccagacttacatcaccaactacaacaaggccctcgagcagctccaagacgccatcgccaagaaagattcctccgccgtcgttaagctccagggcgccatcaagttcaacggcggaggtcatgtcaaccattctattttctgg

SEQ ID NO: 52427 - DNA, 341 bp, Glycine max
  Clone ID: LIB3167-026-P1-K1-A2
cccacgcgtccgactacccggatgtttcaaaaaactaatgtacaaaaatgaatcgcgttaatcacaagcatgactcatggaaaggaaacaccaccacctctaacaccataacatgggcgattaattgcctgaaagggaaattatttcatgacatgggagactccacaggcgtttagtgcacccagatgaactacaagctattgctgccggtgctaataccttgcatgacaaccatgaagacacgaccgacacacatcgtgctcacatgcgcaaggtaatatatgacatggccctgacttctactgagaacgctcatatgcttgtcttgcatgatcaccatg

SEQ ID NO: 52428 - DNA, 248 bp, Glycine max
  Clone ID: LIB3167-026-P1-K1-A3
gcggaccaagccgtccgactagtcgttctgcttcagaggttcttcctttgactaagatgttgctctgaccggagaatgtatgagtcacaggtatactgcgaattccaaccaatacaggatgtgcgaaaaccccttgtggaagcttcatgatttacaccaacttgaactggactgagtgaaccaccagcgagacctttgtcatgagagtggaacctattacagattagttggctggtgatgacatgaga

SEQ ID NO: 52429 - DNA, 367 bp, Glycine max
  Clone ID: LIB3167-026-P1-K1-A4
aaccgatgccatatcttttgccactttacaaaaaacagtctaactaacaatgtcatcttttgttgctcttcagggcctgcatggctctcttctcagctcccagttcctaggccaagacaccctcactcatttccaccctcgcaacaaggcttcttccaccattcaaaacaagccaacaacagcacaacaaccaagtgccaaatttgacatgctgcaaatcgtaggaggaagaggactatgcaatggagaagcaggcctaaaacaagagctgaagaagcaagttggtgttgatgaaaaaggacaaacttcagcaacaagtggcaaagagcaagaagaggaggaggaatcaacaagtgttgttgctact

SEQ ID NO: 52430 - DNA, 383 bp, Glycine max
  Clone ID: LIB3167-026-P1-K1-A5
aaacaagtagttgagaactaagaagaaggaaatggcttcctcaatgatctcctgccgagctgttaccaccgtcaaccgtgccggtgccggcatggttgctccattcaccggcctcaaatccatggctggcttccccacgaggaagaccaacaatgacattacctccattgctagcaacggtggaagagtacaatgcatgcaggtgtggccaccaattggcaagaagaagttcgagactctttcctacttgccagacctcgatgatgcccaattggcaaaggaagtcgaataccttctaaggaaaggatggattccttgcttggaattcgagttggagcacggtttcgcgtaccgtgagcacaacaggtcacctggatactatg

SEQ ID NO: 52431 - DNA, 377 bp, Glycine max
  Clone ID: LIB3167-026-P1-K1-A6
cataacttggctctgtcacctgtgtattttataattagctgataacatgttaaagcgatcatttctagttccatagcagagcctttggaatgtaaatgacttgacagttgacacttgcttgatataacagagattttggaaaaaaataatgtctctttgcattgtggaaatttattttcatgctgttctttattttcacttttgaatctcaataatattatttatttcaacatatatttcatttacgttgaagtagcactcctcccttgagaggcggagtgatcttctaaggaattggcctgggttgaacttcttaggatgagactcacctttggatcaataaggcttttgaattttttatgtttgtatatatgacc

SEQ ID NO: 52432 - DNA, 377 bp, Glycine max
  unsure at all n locations
  Clone ID: LIB3167-026-P1-K1-A7
cccacgcgtccgcccacgcgtccgcccacgcgtccgcccacgcgtccgggcacgcgtccgcccacgcgtccgtaataagttaataactcgcgtagcgcaaggaacagcataaacgacgctgcgctgaacaacgacggtgtcagacaaacggtgccggttggtggggccgccacgctattacgcctaatcgtatccatcaccctcatcaaaacccctcctttctcttaatttagaaaccctaattcagaagatanaaagtactttctccagaattagcgcgctaatggcatcttcagactcatggatgaaggaatataatgaagctgtgaaacttgctgatgatatcaatggcatgatttctgaacgtagttcgtttc

SEQ ID NO: 52433 - DNA, 378 bp, Glycine max
  Clone ID: LIB3167-026-P1-K1-A8
cccacgcgtccgaaagaaggtagatacattgaccaaagccatggaagttgaggcgaaagaagatgagaagggaagtagctgctatggagaaggaggtagctgctatgcgtgtggagaaagaacacgagaacagagcaaagcggttcagcaatataaagggccctgtaaacattgctcagcaacagctaatttctggaagaaacgtgacacggggtggattaacacgcagcacccaatgacagttagtctatgacagtggcgcttgggagtagtaatctttcataggcatcattcttttgcccttctctgttttttcccttgtgtttttgtccaattgagttactgctgatattagccatggattggggataagaaaac

SEQ ID NO: 52434 - DNA, 288 bp, Glycine max
  Clone ID: LIB3167-026-P1-K1-A9
gaggggctggcaacgcctggcgccgcgcgcacccattgatgaccgatgcatgagcttctgcatgggcctcggtcgaaaacccttacgggacgatgcccgagatcgcacgagcttccgggtcatggacctgaggcgctggcgcgaagatcgaactctcgatcaagtgctgatggctgattagctgtaccgtcaattcgtcgtaacatttggaataagttttaagatgatctgtgccgcttgcatatatatataattctgtgatacgtagcatgtatattactgtatgca

SEQ ID NO: 52435 - DNA, 378 bp, Glycine max
  Clone ID: LIB3167-026-P1-K1-B10
ctttatgtcattactcctgtaccacataaagcacacctttgactgtgtcaattcccctcacaatcccaagaccaagacaccaaggtgtgctttatgtcattactcctgtaccacataattctctcgaaaaagtcaacgtcttgctacagggttatatccaaattccatcttgtttattgcaggttcagggatgcatctcaccttacatgtcagcaaatactttgactttgacttcaaactagttattcatgtgttggcaaagagaaccattatagtaacatattaacagggtaatagccaccattcccttcacgggttagaagcatcgttccatggaaggacatatattgtaatttacatatgccccagagcattttt

SEQ ID NO: 52436 - DNA, 371 bp, Glycine max
  Clone ID: LIB3167-026-P1-K1-B11
tgagatggacggagaaacaagcggatcttcaggacgtagctgggatcctgggttggaaattgaggtcccttttgagcagaggccggtgaatgagtactcatctctaaaggatggaatcttgtattcgtggggtgaactaggtccgggatcgttcttccttcgccttggaggtctctggctggcagtatttacagttcttggggggccaattgcagctgcaagctttaatccttcaaaagagcctctaagatttatactagctggtggaacaggaacactcttcattgtgtctttgattgtcttgaggatttatctgggttggagttatgttggtgatagacttctatcagcggtcatcccttatgaagaaa

SEQ ID NO: 52437 - DNA, 364 bp, Glycine max
  Clone ID: LIB3167-026-P1-K1-B12
cccacgcgtccgcccacgcgtccggaaacatttgcttttgaaaaacccctcactcttaatcactacactagctagccacatacaaggtcgaccaaatttaaggggtttgggaattcacaagcgatgacttattcctaaaccaaggtattcctgaaaacattaccgaattccaagtgactctgtcccttgcttgagactacgatggcgacaactcaaccaacggaaagtgtatttcttactgggacactgaaaaggtgactctcgcagtgataaaaaaattctagagaaaatacgcacccaccgcactgtggggtaatgggcttgtgagcattggaaacaaaaacaaacaattttcttttaccat

SEQ ID NO: 52438 - DNA, 379 bp, Glycine max
  Clone ID: LIB3167-026-P1-K1-B2
aaacttctcagacacatctgaaagatattcaagcaaaatctcatagtggttctgctagaagttgcactaaagttcacaagaaggggattgcgctcggtaggtcagtggacctcacaaaattcagtgattatggggaattaattgctgaattagatcaactattcgaatttggaggtttattaacttctccacaaaaggattggcttattgtctacactgataatgagggagatatgatgcttgttggtgatgatccgtggcaggaatttgttgcaatggttcgcaaaatttatatctaccccaaagaggagattcagaaaatgagcccgggtaccttgagttcaaagaatgaagagaatcaatctgctagtgaaggtgc

SEQ ID NO: 52439 - DNA, 379 bp, Glycine max
  Clone ID: LIB3167-026-P1-K1-B3
ctggggtgattcgttttaatctttaatgggattgggcttcacaaattctcaggctacgacttgggtgttggatttcattaagttgtgataaacatgggaaaagactcatagccaaaggagttcgtaggcacgggaaaggggaaacaggctgcaagtggaagtgatgagaatgcttctaagggaaaaggaaaaggtgggaaaggtggtgatgggcttggtacttgcacctatgttaaagctaggcatatcctatgtgagaaacaaggtaggatcaatgaagcctacaagaagctgcaggatggttggcttggcaatggagacaaggtcccaccagctgagtttgcaaaggtagcacaagagtattcagaatgtccatcac

SEQ ID NO: 52440 - DNA, 355 bp, Glycine max
  Clone ID: LIB3167-026-P1-K1-B4
ttctttcctcctcgatcccaattccactagggattcaattccgatgcgattccgagcttgttagatccacgacaacgtttcgtttcccagattcttttgtaaaaaaaaataatcttcctttgcccaacaggtaagttggaaaaaaatggaccatgacaagactgggtgccaagctcctcctgaaggtcctatattgtgcatcaacaactgtggattttttggaagtgcagctaccatgaatatgtgttctaaatgccacaaagacatgttgctgaaacaggagcaggccaagcttgcagcatcatccattgggaatattatgaatgggtcttcaagcagcactgaaaaggaacct

SEQ ID NO: 52441 - DNA, 360 bp, Glycine max
  Clone ID: LIB3167-026-P1-K1-B5
cccacgcgtgcggccttgtcggcgtttacactttatcacagcaccttgatcggcggcgcgctctttcacaaagcgcccgatgggccgcgtgttgaacccgctgcgcgaaatgggcgtgcacgtgaaatctgaagacggtgacctgctttccgctactctgcgcgcggccgaaaccccgacgccgatcacctaccgagggccgatggcctttcgacaagtgaaggccgtcctgctgttcgccggtcttaacacgcccgggattacgacggttattgagccgatcatgacgcgcgatcatactgaaaagatgctgcatggcctttggcgcctaccttaccgtttagaccgattccgaccgtt

SEQ ID NO: 52442 - DNA, 360 bp, Glycine max
  Clone ID: LIB3167-026-P1-K1-B6
aacaaatcaaagccatggccacctccaacttctctattgttctctccgtctccctagccttctttttggtgctacttaccaaggcacactcgaccgataccgtttctttcaccttcaacaagttcaacccagtccaaccaaacattatgctccaaaaagatgctagtatttcatcctctggggtgttacaactcaccaaagttggcagcaacggcgtgcccacctcgggatctctcggtcgtgccctttacgctgccccaatccagatttgggacagcgaaaccggcaaggtagccagctgggctacatcctttaaattcaacattttcgcacccaacaaatcaaactcagctgacgggc

SEQ ID NO: 52443 - DNA, 379 bp, Glycine max
  Clone ID: LIB3167-026-P1-K1-B7
agaaaaacaagtagttgagaactaagaagaaggaaatggcttcctcaatgatctcctccccagctgttaccaccgtcaaccgtgccggtgccggcatggttgctccattcaccggcctcaaatccatggctggcttccccacgaggaagaccaacaatgacattacctccattgctagcaacggtggaagagtacaatgcatgcaggtgtggccaccaattggcaagaagaagttcgagactctttcctacttgccagacctcgatgatgcccaattggcaaaggaagtcgaataccttctaaggaaaggatggattccttgcttggaattcgagttggagcacggtttcgtgtaccgtgagcacaacaggtcacctgg

SEQ ID NO: 52444 - DNA, 376 bp, Glycine max
  Clone ID: LIB3167-026-P1-K1-B8
ctccctcgccactttcttcctaattctctcaataagggttttacttttttgcttaaacccgcggccatggcgacgagggcagcagtggcggcgccgcgcgtttttcggcggtttttctgcacaaactcagcctctccttctttccccttcgttcctacgccgcctcctggcgccacccccactccaactcgacccacggcggagcccaaccccaacctcttcgtctctggtcttagcaaacgtactactacagaaaggcttcgagaggagtttgcaaagtttggtgaagttgttcatgcaagggttgtaactgatcgagtctcaggttactctaagggttttggttttgttcaatatgctacaatagaagaggctg

SEQ ID NO: 52445 - DNA, 373 bp, Glycine max
  Clone ID: LIB3167-026-P1-K1-B9
cccacgcgtccggttgtattacgccttttccttccaagacacttccctgattggctggaattgcctggtgctctgattcttcttatcgttgtagctccttctctaattgcaagcacctttagagacaacattgttggggtggtagtgtgcctcatcattgcatgttatttgctgcaagaacacattcgggcttctggtggtttcagaaactccttcactaaagctcacggcatatcaaattccattggcataatacttctgttggtttatcccatctgggcgctggtggtcatacttttttaggcaccaccatttggacttggttgatatgtgagaattaaaccaagtgtcttctgtatcattcatttgttgc

SEQ ID NO: 52446 - DNA, 243 bp, Glycine max
  Clone ID: LIB3167-026-P1-K1-C1
aaaggccattgagggtttttctcgtagatactctgttccacttgatctggtatacagaaaggttgatgggaaaacggggtgtgtttattcacgtatcaaggattcttcacgacatgctttggaggttatgtctgaagatgtgccagctactattgctaaaatgtcatttgcaaagacactgcgttgcaattaacacgctatgtttaccaagcctattcgcttgatattagacctgcattgaga

SEQ ID NO: 52447 - DNA, 155 bp, Glycine max
  Clone ID: LIB3167-026-P1-K1-C10
cccacacattcgcattattgaagatgctagacatccagctaaatacaagaggtgggttggaatggtcgatgtcatatttactgatgttgcttaacctgatgaggctaggatttacgcgctgaatgcttcataatatgtgtaaacaggaaggcatt

SEQ ID NO: 52448 - DNA, 369 bp, Glycine max
  Clone ID: LIB3167-026-P1-K1-C11
cccacgcgtccgcccaaaccctatcccttattcgcctttgtccaccctcaatggcctctgtttcagccacttctctcaggttccaaccctttctcaagttgtctacaaggactactacccaggggtgttacaaaacttcaagtttgggggcagtttctgtgggatggaataggagaacctttccctctttgagatcctcccgtttacgcatttgtgcagtcaaggcacaaccggagacagtgcagaaggtctgcgatattgtgaggaaacaacttgctctgcctgctgaatctgagcttaccccagacaccaaattttcagcacttggtgctgattcccttgacacggtggaaatagtgatgggtttag

SEQ ID NO: 52449 - DNA, 370 bp, Glycine max
  Clone ID: LIB3167-026-P1-K1-C12
cccacgcgtacggttgttttcttagtggaaggaaattgagggtgaaaaaggagagagcagcaattggaggacgatcgatgggcactacagtgtgcgcagttgctgagcctgacagacctctatggttcccaggcagcacccctcctccatggcttgatggcactctacctggagacttcggctttgaccctcttggtcttggatctgacccggagagtctgagatggaatgttcaggcagagctagtgcactgcagatgggcaatgttgggtgctgctggcattttcatttcagaattcctaacaaagattggtgtcttgaacactccttcatggtactcagctggagagctggaatacttcacggacac

SEQ ID NO: 52450 - DNA, 97 bp, Glycine max
  Clone ID: LIB3167-026-P1-K1-C2
atgataattcctctgcccattctagggttcccaaatggacgctgccggaatgatcaagaacgccgcccgacgaagacagggcgcttgccctaagaag

SEQ ID NO: 52451 - DNA, 381 bp, Glycine max
  unsure at all n locations
  Clone ID: LIB3167-026-P1-K1-C3
cccacgcgtccgctcttcctcgttcccaagccccacgcgcattgacggaaaccaccgttcttcctttctcatcccattcatccgcaacataacttccatccccgccaacctccctcctctcaggatatccaacagcgcccccgtcaccccacctctctcctctcctcgtagctctaagcgcaaggctgatttcgactccctccataacgcctccctccgccaccctctttttgccacctccgccccttccagcccctctcgccgccaccacctngccaccttcaccatcccggagtgcgatgagtccgacgcctncaccgttgactccgcctctgggcgctgggttagttttcaggttcagacgacgatggcggccgctct

SEQ ID NO: 52452 - DNA, 377 bp, Glycine max
  Clone ID: LIB3167-026-P1-K1-C4
aaacaagtgccgataatctaatcgtgggaagtcatgattcagcctcgtggcaagacaacatcaacaacaacaataacagcagcaggtttgatgattcttctctaaggtgtgtgtttccttgtgaaaccaacgaaaggcctagccaaggtctttcactctctcttagttcaaccaacccttcctctatcgggttgcaatcttttgagctaagacaaacaggccaacatcttgattttgtttcgtcgagttccagagatgggttctttggaaaaccagtttctcttcaacagcaacagatggtatcacaagatgggtatgtgagttctaattctaaagttgcaagcgtttatcaacaaggacatttcctggtgaagaac

SEQ ID NO: 52453 - DNA, 295 bp, Glycine max
  Clone ID: LIB3167-026-P1-K1-C5
gacttttggaaggagctgtaaattctatgtctactttaccaagcactagtgtgagcggttttccataagttgcaacatggtgtgcccactcctaagcatatatgcttaactcaatattgcacatggcagaagcccatgcagaaacatcggccgatgtagtttactggaagatgaagctcccaccacatgaatgcctaaagccattccgggtatgctctgacccatattaggcaggcgacaaaaccagctctgtggccgtaggaaaggggagcgtcaccgttcacgcagggagaac

SEQ ID NO: 52454 - DNA, 344 bp, Glycine max
  Clone ID: LIB3167-026-P1-K1-C6
gctagatctccgtaataatggataattttccgaacacaaagaagacctactgggagagcagggaatgcatgaagaacacgctccacagggtcatccaatacaagacgggcatggacagcatcgccggtcacggaaaacgccgatatgaccgcaaacattgcggatacggataacagactaatcctgtatttgacatataggccgaaaccacctagaaaattgtgtaagaggctccagcgtcagggatgcaagcatgtcctagagcacgctatcaagaggtgcatgcattttgagatcggttgtgacatgaagggtaaaggtaccattctgttctagatggaata

SEQ ID NO: 52455 - DNA, 375 bp, Glycine max
  Clone ID: LIB3167-026-P1-K1-C7
cccacgcgtccgcccacgcgtccgcaattctccaaatacctaatatggagtttcacattcttcccatcattacttttctcatgcttgttgtggcaactaatgctgatgctgcattacctcctgcattttactggaagtccaagcttcctaccacaccaatgccgaaagccatcactgatttgctacaacctgattggaaggaagagaaagacacctctgtggatgtagggaaaggtggagtaaatgttggtgtagaaaagggaaaccaaggaccaggagatggcactgatgttaatgttggtggtggagacggtggagtgaatgtgcacacaggaccaaagggtaagccagttcacgttggagtgggcccacatt

SEQ ID NO: 52456 - DNA, 377 bp, Glycine max
  Clone ID: LIB3167-026-P1-K1-C8
gtgtttttcatttcatcgtgcattcaatggccaccacagcagctctatccggaaccatggtgagcacctccttcatgaggaggcaacctatgaccaccacaagcctaaagacattccccaacgttggtgaagctctttttggtctgaaaagtggacgaggtggtcgtgtcacttgcatggcctcgtacaaggtgaagctcataaccccagaaggagaagtggagtttgaatgcccagatgatgttttcattgttgacaaggcagaggacgaaggcattgaacttccctactcgtgcagggccggttcttgcgtttcctgtgttggcaaaattgtggaaggtaacgtggaccagtcagatggtagcttccttgatgat

SEQ ID NO: 52457 - DNA, 375 bp, Glycine max
  Clone ID: LIB3167-026-P1-K1-C9
ctgaaaccgcctttcgcaaatttttccaatttctcgaaatcctaaccctatggaactctcgcgcctcttggtttccgacacgttactcttctcccctccgattcgctactccccttcgccggcgctgtccacgttcttcgccgtcaagaaccgccggtgcaggaggaggagcagcttctgttccgcctccaaccccgacaccttaaccgccggtggtggcgccgtcgtcgtcggcgccggcgagaagcacgaggaggatttgaaatcttggatgcacaaacacggcctccctccgtgcaaggttgttctgaaggataaaccttgccccaatgattctcataagcctatacattacctcgcagcaagtcaagatct

SEQ ID NO: 52458 - DNA, 379 bp, Glycine max
  Clone ID: LIB3167-026-P1-K1-D1
atcaaaaccttttaagtcttcatagttttccttctttctttctttgtgaaaaaacaaaaagtccaaaccatggctcagaaaaccgagaaagaagaaaccgacttcaaggttcccgaaacgattacgctttgcgttaacaactgcggcgtcaccggaaaccctgctacgaataacatgtgtcagaagtgcttcaccgccttcaccacctctaccgccaccacgtccggcgccggaggtgccggaatagcttctccggctaccagatccggcatctccgcgcgtccactgaagagatcttttcccgaggagccctcgccgccggcggatcctccgtcttcagaccagacgaccccgtcggaggcgaagcgcgtggtgaacc

SEQ ID NO: 52459 - DNA, 377 bp, Glycine max
  Clone ID: LIB3167-026-P1-K1-D10
gatctcccaaacaaattgtagcataagtcccatggccaaagagactagtgttggttatctatatcccagcaaatcacaagtttggggtgagaattttgatcataaaaaacttgtaataacaacactagctgctaatggaaagaaggaggagagtaatggagcacctaatgacacatatcctgcgtttcccgggtggtatgctgatgtttcctggccaggagaagcacacacatataaaatagaaaagattctattccacgggaaatcagaattccaagagcttcttgtatttgagtcttctagacaaggcaaggttgcaattcttgatgggcatatccagctgacagaaaacgatgaatttgcttaccaagagatgc

SEQ ID NO: 52460 - DNA, 375 bp, Glycine max
  Clone ID: LIB3167-026-P1-K1-D11
ctttgttgcgtttcgagtgtctgtggaatccctaaccctaatttattgtgtggcgaaatgggatcaattggggtactcctggtggctcaggtgataccgtacctggagcaagagctggacaagcgctacaagctgtttcgggcgtatgatcagccgcagacggcgcaggttctaagccagcacgcgagctcgatccgtgcggtggtcggaaactcgaacgccggcgccgacgcggagctgatcgaggcgctgccgaagctggagatcgtgtcgagcttcagcgtgggagtggacaggatagacctggacaggtgcaaggagaaaggaattcgcgtcaccaacacgccggacgtgctgaccgatgaagtcgccgac

SEQ ID NO: 52461 - DNA, 374 bp, Glycine max
  Clone ID: LIB3167-026-P1-K1-D12
ctttctttgctttcccccctttctggtttcaacgctgcaactatccatggcaaaccactggctcagacccgaggtgtatccactgttcgctgcggttggtgccgctgttgggatctgtggattccaattggttcgtaatatctgcatcaaccctgaagtcagggtgaacaaggagggaagaaaggcaggagtgttggagaactttgctgagggagagaagtatgctgagcatttcctgaggaagtatgtgcgcaacagaactcctgagattatgccctccatcaacagcttctttgctgacccaagtcgcaactaagttgctttgaataaataaaggtttatgtgagatatgaattctattatggttaaagaca

SEQ ID NO: 52462 - DNA, 380 bp, Glycine max
  Clone ID: LIB3167-026-P1-K1-D2
cccacgcgtccgatccaattacagaatgtctggcatccaatcataaaatgtcatgtacggtaaggttaggttactgacttctgtaattactaaagttatatatctaggaggatttcttataatttgacagagtaaaaatctgtatagtgagaatatatgaaaatgagaaatgtttcttggacacctcatatgctaatatacacctagagagagaaaaaaataatgaagaaaagtgatggatgtaatatgtatttgatgtgacaaaaagagagagataaaaacaaataaaaaatctcaatcaggtgtctaaaatattggagtgtctaactatggaaattaaactatgtaatagagcatctttggttaaagtaaacattttt

SEQ ID NO: 52463 - DNA, 378 bp, Glycine max
  Clone ID: LIB3167-026-P1-K1-D3
gtgaaagatgccttgggcgaggctttcagggtctccaaggctcgacgttgctattgacatgggcaatccatttctcaatctcactgttgatggtttccttaagatcggagctgtcgcagccacgcgatcagctgctgaagatacttatcatattatccaaaaggggaatatctcaagtcatgatttcgagaaaacgttgaagaagatgtgcaaagaaggtgtatattggggaactatagctggcgtttatgttggaatggaatatggggtagagaggatccgtggcaccagagattggaagaatgccatgattgggggtgcagtaactggggccctggtatctgcagccagcaacaacaagaaagacaaaattgcaat

SEQ ID NO: 52464 - DNA, 377 bp, Glycine max
  Clone ID: LIB3167-026-P1-K1-D4
gttgagaactaagaaggagaagcaaatggcttcctcaatgatctcttccccagctgttaccactgtcaaccgtgccggtgccggcatggttgctccattcactggcctcaagtccatggctggcttccccaccaggaagaccaacaatgacattacctccattgctagcaacggtggaagagtgcaatgcatgcaggtgtggccaccagttggcaagaagaagtttgagactctttcctacctgccagaccttgatgatgcacaattggcaaaggaagtagaataccttcttaggaagggatggattccttgcttggaattcgagttggagcacggtttcgtgtaccgtgagcacaacaggtcaccaggatactacg

SEQ ID NO: 52465 - DNA, 381 bp, Glycine max
  unsure at all n locations
  Clone ID: LIB3167-026-P1-K1-D6
attacaaatcccctccacctccatctccatctccaccacctccttactactatcaaagtcctcctccaccatctcccactcctcatcctccctactactacaaatcccctccaccaccaacgtcgcatcctccaccttaccactatgtgagccctccaccaccttctccatctcctcctccaccataccattacacatcaccacctcctccttccccagctcccgctcccaagtacatttacaaatcacctccacctccagtttacatatatgcttccccacctccacctatctacaagtaagttcgaattgcggaagcaccattcacgataaatcatgttctagtttttatcgaggaataaaggcaagctctatntggag

SEQ ID NO: 52466 - DNA, 258 bp, Glycine max
  Clone ID: LIB3167-026-P1-K1-D7
atatggaggaggagctggaattggtggagttggaggacttggaggtggtagtggtctaggtggtggaattgggggaggcatttacaaaggaattggaattggaggaggcatttacaaaggaattggatttggaggggttggaggtggtgtatgttctattggtggtgttttatttttaatttttatttttacatatatttttatttttatttatttatgatttattttttaaattttattaatattattatttttttt

SEQ ID NO: 52467 - DNA, 380 bp, Glycine max
  Clone ID: LIB3167-026-P1-K1-D8
tgctcgttgagatcgatgtgaatctggaccttcacgaccggagcagcatccttgcagtgttgcacatggctccaagtcgtgcatatacactatacactcccaaacctgaaaagaagaacaagaaaccacagagatttccaaaaccaaaagcaaagcgaagaggaactgagacataaaaaaaaaaaagagaacaagaagaataagaaaccctagctcagcaacgacacttcaaaacagcaaaacgagagatccaaaaggggatcagaaggaagcaaagaagaggcaaatgaacatgtttgctattaatcgcatcagaactatgtttaagggtgaagattttggaagattttgtaaggaaagacagattcggaggacaaagg

SEQ ID NO: 52468 - DNA, 377 bp, Glycine max
  Clone ID: LIB3167-026-P1-K1-D9
ctcacacgaccgtccacgcgtccggtccatgccaggtaagcacggccaaagcagcaccccaaatggcttcagtttgtggtcccatggggttggcactgagctctgcgaccaacaacaacaagcctttatccgaagccgttacaaggccacttcccatgacgccaccgacgaggacactgttcagcacaaaggcagtgtcaaactgcacgcctgatatcaatgcatatttgaaggagaaggcagttgccagactcacagcagctcttgtgacagcatctatagtggttacggaagtggatcatgctgctggatatgagttctgcccttgcctaaagaactttctactcagcatctttgctggtggggttgatctagca

SEQ ID NO: 52469 - DNA, 209 bp, Glycine max
  Clone ID: LIB3167-026-P1-K1-E1
cccacgcgtccggtttcttacaaggctctactctactgcttcaccttctgctctagaaaattcagtggtgatacatggcttcggctactctctctgtagccaaaccagcccttcaggcaaatgggaaaggcttctctgaattctctggcctccgcagctcatcaagcttcctttccttttctagaaaatcttcagaggatttccattct

SEQ ID NO: 52470 - DNA, 375 bp, Glycine max
  Clone ID: LIB3167-026-P1-K1-E11
gcaaaaatggcatcattcaccatgacagcttccatccttggcagcccagccgtgaccaaccggtcggcagtagcaacgcagaggagatcactcgtagtgaatgctgccaaagctgttgaagcagaaaaggtcagttatgacaatgacatggatggtagcaatggaaggaggaacttgatgttcgccgcggcggcggctgctgtttgctctgttgctgggatggcagtggcagatgagcctaaaccaggaaccccagaagccaagaaaaagtatgctccgatttgtgtcaccatgccaactgctaggatttgtcgcaattgagggactttggtttttattttacttctgatgattggaaatgtacaatggggttgt

SEQ ID NO: 52471 - DNA, 374 bp, Glycine max
  Clone ID: LIB3167-026-P1-K1-E12
gggcaagcctgctgcttccggcgtgtggtccaccatcaagcctttcgtcaatggtggagcctccggcatgctcgccacctgcgtcattcaacccatcgatatgatcaaggtgaggattcaacttgggcaaggatcagctgcgcaggtcacttccaccatgcttaagaatgagggttttgctgccttctataagggtctatctgctggattactcaggcaggctacatacaccactgcccgtcttgggtcatttaaaatcttgacggccaaagctattgaggctaatgatgggaagcccctgccactgtatcagaaagctctatgtgggctgactgctggtgctatcggagcaactgttggtagtccagcagatt

SEQ ID NO: 52472 - DNA, 282 bp, Glycine max
  Clone ID: LIB3167-026-P1-K1-E3
aaagatgagcgacgaggaaagaacgaagcaaatagcggagctgagcaaaagcctgaaagaaggagagagaatcgtgggcccaacgagacggcccgacggaaccctccgcaagcccattcgaatccgcgccggttacacccctcaagacgaagtcgccatttaccaacccaaaggagcactcctgaaaaaggagatgggctcggctgggccttccggctacgaccccgacgccgattccaagcccaagcccaagaccaagtccgtcagaggaacgagagaaag

SEQ ID NO: 52473 - DNA, 372 bp, Glycine max
  unsure at all n locations
  Clone ID: LIB3167-026-P1-K1-E4
tcaacactcatatccttatcctgtttctttcaatggaagtcatttctgcttctagcttgaatcccaacgctccgatgttcgtgccactcgcctatcggacggtggaggatttctccgaccagtggtgggacctcgttcactcctccccctggttccgcgactactggctccgcgagtgcttccaagatccccagttccaaaacgacgacgctttcgacttcgactttgacctagatctccgtaactcacttacttaacttctctccatttactactntatgtcttcttttttttgtttaattaatttattttatttggatggatgcagaagatgaagatgaaagggaacgaaaggaagggaaggagtggtgt

SEQ ID NO: 52474 - DNA, 379 bp, Glycine max
  Clone ID: LIB3167-026-P1-K1-E5
atggtaccagagtagagtagtgcggaagaaaagaaaaacgaaatccctcgctttgagaaatgggtgtattactcttccggtgggttctgccactgactctgttgctcacttgcgcgttaggtttccaatcggacgagcttctcctcgacgaccaagagttcggcatcgagggaggacgagcctccttcgattccgattcgcacccatctcccacctccaccttgaggaagagcttttctgactcctcctccgactccaagatccacttccctctccaacacgctttcggcgactccgatttctccgacgccggcaacttctccgctcgccttaagacttggagccacggcgcccagacgctgacgaagctgcggtttaa

SEQ ID NO: 52475 - DNA, 313 bp, Glycine max
  Clone ID: LIB3167-026-P1-K1-E6
accaaatgaaaactcacttggcataagtaatggatatctaactatctctacagagcggccagaggctctctgcaaagccacctattaatccgccggctatgaccactcaaccttcatttgtcgatatgtcagaactaagattgccaggatctaacatacccgaggagacgataccaaacgaggccgcgtatcaaataataaacaaagagacgatgctggatgtgaacccactgacgaacttggcatcattagagacaccctggatggagccagagtgtgctcaactcatcatggctgctacatatcagaactt

SEQ ID NO: 52476 - DNA, 383 bp, Glycine max
  Clone ID: LIB3167-026-P1-K1-E8
ctgcagcagtgcaacctgaagaagaggaggaggttgatgaaactggtgtggagccccatgacattgatttggtgatgacgcaggcaggagtgtcaagaagcaaggccgtcaaggctctcaagactcacaacggggacattgttggagccatcatggaactcactacttaattgggggtttatgttctatttgtatgtttttttgggaatgatatttagaactagtgccgtttctatgttataaaccgaatcaacataaccgttttattgtttggtatttggtgttttactcctttactcttttatatattgttggttttttctaataatggttcttataatactttattatttagttatctatctatttttgtaatgtatttt

SEQ ID NO: 52477 - DNA, 339 bp, Glycine max
  Clone ID: LIB3167-026-P1-K1-E9
cccacgcgtccgattttatatatacctctttcaaaaaaaaaaaaaaaaaagagggaaaaaaaaaaaaaaaaaaaaaaaaaaaaaaaaaaaaaaaaaaaaaaaaaaaaaaaaaaaaaataaaaaaaaataaaaaaaaaaaaatataaaaaaaacaaaaaaaaaaaaaaaaacggggcggcccttttaaaaaaccaaattttacttcccctttctttcaaatttaaattttttttttagggtcacctaaataaaataaactgcccccttttttaaaactcttttaattgaaaaaacctctttttacccaaaataaatcccttttaaaaaaaaccccttttt

SEQ ID NO: 52478 - DNA, 379 bp, Glycine max
  Clone ID: LIB3167-026-P1-K1-F1
cccacgcgtccgcccacgcgtccgcccacgcgtccgtgaaatgttgtcaccccttcttctatttctatgcctaactcttcctttgtttttgttgtccttcttcaaataccgtaaaaccttcaagaatccaccacttccaccaggtcctagaggccttcccataatagggaatcttcatcaactagatagtccttctcttcatgagcagctatggcatctctcaaagaaatatggtcctttattttcccttcaatttggattaaggccagccatagttgtttcctctccaaaattggccaaagaggtaatgaaagacaatgaccttgagtgctgtggacgacctaaattactaggccaacagaaactaacctataatggg

SEQ ID NO: 52479 - DNA, 374 bp, Glycine max
  Clone ID: LIB3167-026-P1-K1-F10
cccacgcgtccgttcttctcccagtgacagcaactcccatttccactctcaccaaaaccctccctctctcaaatcactacttactctcctataaattcaaattcaactccctcgtccgccattgctccctctccgaccgcgaggagcagcgctggctccgcgaggagcagcgctggctccgcgacgaacggcgctggctccgcgaggagcagcgctgggctcgcgagcgcgaccagctcctccgcgagatcgccgacctcaacctccaaatccaggcgcttgagcgtcgcctctcgatgcgcgatttgtcctctccggcttccgtctccgacgccgtcgccaatgtcacgttgctcctgaaggtgctgaaggac

SEQ ID NO: 52480 - DNA, 373 bp, Glycine max
  Clone ID: LIB3167-026-P1-K1-F11
ttcgagcgacgccccacgcgtccgcccacgcgtccggaagcctccaattcgtgccactctcttcaaaatggccgtgaccttctcaaatctccacacagaatcaggtctcaagtccctcgacgacttcctctctgggaaggtctacgtttctggggatcagttcacaaaggacgacatcaaagtgtatggtgctgttttggagaagccaggtgactcttttcccaatgctgccaagtggtacgaggttgtctcatctcagcttgctgcaagcttccccggcaatgctcaaggggtgagattcagtggcaaagcttctgctccagcggaggctgctcctgcgaaacccgatgcttctgcttgctgagatgatgat

SEQ ID NO: 52481 - DNA, 372 bp, Glycine max
  Clone ID: LIB3167-026-P1-K1-F12
cccacgcgtccggctattcattcattcgtgttcctcaggagagagagggtgcgtgtgattcggattcgaattcgaattagggttttgcgcatcgtcatcgaatttttctcttatgcaaggaaggttttccttctccgatttgaatttgattgaacgagtagtgttaagattatgatattttttgagaagcttcgtttctctcctcacttgagccgcttcattgccggcatcctcctgttaatcttctgcaattcattccagttagtctctaatttccccattcctatacagccttagattcaacgtcgatcgctacactcttctcttcgattcgtacgattccgtattcgatattcgtttgtttgattcact

SEQ ID NO: 52482 - DNA, 378 bp, Glycine max
  Clone ID: LIB3167-026-P1-K1-F2
gcattcacaaataaggttgaagaggtcactgccggaagaagggagcaacaccatgtttcattttccggcgatctcttgtttcttccatcatcaccgttttccggcgatccctaatcctcgcaaacagaaatgacgacatcaaggcgccttgcggacaggaaggtggagaagtttgagaagaacatcacaaaaagaggatttgtgccagacactaccactaagaagggaaaagactaccctgttggcccagtgctgctcggtttcttcgtctttgttgtcattggatcatctctcttccagataatcaggacagcaacgagtggaggcatggcttaaatggagctttgttttggattttgtgtcatcttctctttctta

SEQ ID NO: 52483 - DNA, 380 bp, Glycine max
  Clone ID: LIB3167-026-P1-K1-F3
cttagctttgattctctgttctctgttttgttctgtttcgcgtgtaagttcccctggtcctcttttcctctttctaagattgtcttcatacaggaacttgaacaatgaagaatgcaaagggcaagggagcagcaagggcctcaaaagaatcactgaagcccgttgatgaccgaaaggttggaaagcggaaggcttccggtaagcctgggagaagtagtgcaccaaagaaggagaagaaggccaagaaagaccccaacaagcctaaaagaccacccagtgctttctttgtgttccttgaggagttcaggaagacctttaaggctgagaatcctaatgtgaaggcttgatcagttgttgggaaagctggaggagagaaatgg

SEQ ID NO: 52484 - DNA, 214 bp, Glycine max
  Clone ID: LIB3167-026-P1-K1-F4
cccacgcgtccgttcttctcccagtgacagcaactcccatttccactctcaccgaaaccctccctctctcaaatcactacttactctcctataaattcaaattcaactcccttcgccgccattgctccctctccgaccgcgaggagcagccctggctccgcgaggagcagcgctggctccgcgacgaacggggctggctccgcgaggagcaacg

SEQ ID NO: 52485 - DNA, 374 bp, Glycine max
  Clone ID: LIB3167-026-P1-K1-F5
cccacgcgtccggaagttatgagtgatgatgatattgacgggaaaacatgtcctatcttatgtttctttccctttgagttgagaattccttgttgatcactcactcacacccatctgtttcttgcttcccaacatcatggacttggacttcaggagggcttcaaccattcattccaccaatcatcacttctcttctctccaaccttctcgccttcactctgatgatgatgatgatgctcgatctcttcttcaatgtccttcctgtgattttgagattgatttttcgtcagcccatacccatttggaagagatgcactgctatgacccaaaaaatctgctattgcctgtgtgtgatgaaacattaggggaggaag

SEQ ID NO: 52486 - DNA, 185 bp, Glycine max
  Clone ID: LIB3167-026-P1-K1-F6
gcctccgcttattcttttgaattgaacaacgtgtatatctctgcttgcatatgagcgtgtcacgtctgaaatatgcacacagaaattaaatgatgttcatttccggtccaaaaaaaaaaaaaggaaaacaaaaaaaaaaaaaaaaaaaaaaaaaaaaaacatcaaagtgtaatggtgctgttttg

SEQ ID NO: 52487 - DNA, 102 bp, Glycine max
  Clone ID: LIB3167-026-P1-K1-F7
accggccaattccggcgaccactcgtttttttgcatatatcttaccctgtctatgtcatgcgggttagcaataatttacaaaactacttacactaaggtgct

SEQ ID NO: 52488 - DNA, 367 bp, Glycine max
  Clone ID: LIB3167-026-P1-K1-F8
ctacccacttctcaaccaacaatggcaatggcaacccaagcctctctcttgaccccacccctctccggtctcaaacccagcgaccgagccaccgcgccatggaaacaatcctccaccctctccttctccacctcgaagcccctcaagttctcgcgaacaatcagagcagcagccaccgaccagaccacagaggcaccggttgggttcaccccaccggaactggacccaaacaccccttccccgatcttcggaggcagcaccggcgggctcctgcgcaaggcccaagtggaggagttttatgtcatcacatgggactccccgaaagaacagatctttgaaatgcccactggcggcgctgccatcatga

SEQ ID NO: 52489 - DNA, 279 bp, Glycine max
  Clone ID: LIB3167-026-P1-K1-F9
ctcattctgtccgtgtctgcatccgaaaccaaaacagatgtggcgcaccactttagacagcagcaccatgagagccctgcgccttcgttccttcctcttctcttcatcttcttcctcttcctcttcttgttgttcactcatcaacattttctgcccatcctcctcctcctcttcgtttacgactttgactacaatcatctctcactcttttcttccttttcccccaacgacgcgcgtcttgttcaccgactcgcgccgcttcggctccccccgttccgc

SEQ ID NO: 52490 - DNA, 378 bp, Glycine max
  Clone ID: LIB3167-026-P1-K1-G1
gttcagaagaagctccccaggtagcttatacatttgatgcagggccaaatgctgttctaattgcacgtaataggaaagctgctacctctttgattcagaggttgctttactacttccctccaaattcagatgacctcagcagttacattattggggacaagtcaattgcaaaagatgcggggatcaatggaatacaggacgtagaagctttgccacctcctccagaaatcaaagataatattccaccccaaaaatacaagggggatgtcagttatttcatatgtaccagacctggaaggggacctgttttgctttctgatagcagtcaagcacttttgaacggtgaaactgggctttccaagtaagttcatgggaaac

SEQ ID NO: 52491 - DNA, 211 bp, Glycine max
  Clone ID: LIB3167-026-P1-K1-G10
atcagccaaggagattgttggtgttaagaagttgattgaaaagaaggctgggcggtatgttcagaatgatctgcgtctcacgactgactatttgcgctttgatcttaacactgacattgctggtaagcctaacgatgagaagaaatcacacaaggaactgactgctaagctctttctacgatatcagcattatggatcatgcaacaaaaat

SEQ ID NO: 52492 - DNA, 370 bp, Glycine max
  Clone ID: LIB3167-026-P1-K1-G11
gatcgagataactagaaacagtgtgatgaaaatgaaggtccttgttttcttcgttgctacaattttggtagcatggcaatgccatgcgtacgatatgttccctctccgaatgaacactggctatggtgcccgtactccggaggtgaaatgcgcaagttggaggcttgctgtggaagcacacaacatctttggctttgagaccattcctgaagagtgcgttgaagcaacaaaggaatacatccatggcgaacaatatagatcagactccaaaacagttaaccaacaagcttacttttatgccagagacctcgaagtccatcccaaggacacatttgtgttcagtatagatggcaccgtactctctaatatt

SEQ ID NO: 52493 - DNA, 358 bp, Glycine max
  Clone ID: LIB3167-026-P1-K1-G12
cacacacagattcccctctttcgaatttcgatactttgatcagatccacaacacttcttcatccatgacgcttggttcttcaggatccagtgtcgtggttccaaggaacttcagattgctggaggagcttgagaagggagaaaaaggaataggagatggcacagttagttatggaatggatgatggtgatgacatttacatgcgctcttggactggaaccattattggtccctataatactgtacatgaaggaagaatttatcaattgaagctgttttgtgataaagactaccctgaaaagcccccgagcgtccggtttcattcacggatcaatatgactttgtgtaatcatgaaact

SEQ ID NO: 52494 - DNA, 306 bp, Glycine max
  Clone ID: LIB3167-026-P1-K1-G2
ccaaggagctacttgtaatagctgttgggcattcacagcagttggtgcggtggaatcactagtcaagataaaaacaggtgatctaatttcattatcagaacaagaggtggtggattgtactacatcctctagtagggggtgcggtggaggagatatacaacatggctatatttacatcagaaagaatggcattagtctcgaaaaggattacccttacctgggtgacgagggtaaatgtgactcaaataagaaaaatgcttttggtactattgatggccacggatgggtttctacccaacttgagga

SEQ ID NO: 52495 - DNA, 251 bp, Glycine max
  Clone ID: LIB3167-026-P1-K1-G4
tttagatttgatcaaaaaaagccctaccatgtgctcacttagcggctaaaccaccaaagtttttacaaaaaatactttcaagctcaatgagggtgataagaaggccaaggattggacggaatatctctcacggcgctggaagagatccattccccttggttggcgaagatgtcgcacagattagaagtgaaaccctgaaggtgccccttgccacctttagctttcagttcttagggttttgtcgcaaacac

SEQ ID NO: 52496 - DNA, 369 bp, Glycine max
  Clone ID: LIB3167-026-P1-K1-G5
aattggctacatagagttccagaggaacgcagagctggacccagaaaagaggctgtacccaggtggcagttacttcgacccactgggcctggcctcagatccagagaagaaagccacccttcaattggcggagatcaagcacgcccgtctcgccatggtgggcttcttgggctttgcagtccaagctgccgccactggcaagggcccgctcaacaactgggccacccacttgagtgacccactccacacaaccatcattgacaccttcttatccttctcttaagaagatgcaaaagaagaagaattgtcttttttgtgcctggtcattctagttatattgtaaaagtcttttttttcttcttcggcttt

SEQ ID NO: 52497 - DNA, 348 bp, Glycine max
  Clone ID: LIB3167-026-P1-K1-G6
aattaaaacaaaaaatgtgcgctgccatatccgaagtggaacaagaagagttgctcgaaaaattggaggtgttcaagatcaaaggcagggacaagcatggccgcaagatccttcgcattatcgccaaattcttcccagcacggttggtgagtgttgaggttctgaaaaagtacctggaggagagggttttcccgaagctgatggggaagaggaaattcgcggtgctgtacgtgcacaccggcgtccagaggagcgagaattttcccggaatctccggtctccggtggatctacgacgcgattccggcgaacgtgaaggagaatctttaagccctttattttattcacc

SEQ ID NO: 52498 - DNA, 401 bp, Glycine max
  Clone ID: LIB3167-026-P1-K1-G7
cccacgcgtccgcccacgcgttcgtaggcaatttcaattgagaatgcagggggagaaaaggaaagatgatgctaagtggaaactactagcgaggaaggtggcctcagccaaagtcatgtcttcattgtcacttccaaagaggaagcgagattaataaacatgagtgacgatttataatttcgggattagaagctttatattattttgaatatgtcttttcttattgtatgtttattcatttttcttttattatttatttatattaattatttatcttaattttattttctattgtggtgtgggtgtttaaattttatattttttcattttattattttttatatattaatactataatattaaatctatctttttattcgatatttcaatatatatttgtt

SEQ ID NO: 52499 - DNA, 62 bp, Glycine max
  Clone ID: LIB3167-026-P1-K1-G8
ctttttagttttttgcctgctggcttctcaagttacgaatgaatgattttgttgcttggacg

SEQ ID NO: 52500 - DNA, 354 bp, Glycine max
  Clone ID: LIB3167-026-P1-K1-G9
attattttcattttcatctttttttgagtatcaacaaatggcaaccactgtgatgaccactctcccccaattcagtggtcttagaccccaattctcagctgcccctgtgaagaacttggttgctgtgcaacccatgagtcgcaaggggaagggtgcattgggagctcgatgtgactacattggttcatccactaatctgattatggtggcttctacaaccctgatgctgtttgctggaaggtttggattggctccatcagcaaacaggaaagccactgcagggctaaagcttgaggtgagggactcatgcttgcagactggtgaccctgctggcttcacccttgctgacacctt

SEQ ID NO: 52501 - DNA, 379 bp, Glycine max
  Clone ID: LIB3167-026-P1-K1-H1
agaaaatgaacagtttatcaatggcacttctccacccaaatcttcttcccactggcagagtccaacactcttacctttccttccatcaaactcaaaccctcactctcgcacgtgccttctccaacccccacacgcttcagtctctctgtttccgcggcggaaaccaccgcttttgccgcccctcccactccccaacctgagaagcttggagttgtagttaagccaacggagaagccgagacttgtgttgaagttcatatggatggagaagaacattggaattgcgcttgaccagatggtaccgggccatggcaccattcctctgagcccatattacttttggccccgaaaagatgcctgggaagagctcaaggagttgc

SEQ ID NO: 52502 - DNA, 215 bp, Glycine max
  Clone ID: LIB3167-026-P1-K1-H10
gaacttcgttactgttacacatgtctcgctccgagcctatggtttgaagcatgattgacttgcttttgcttctggtggccactgatatgatggggccaacaatggtggcagaagcaagaacttgtgagtcatagagccaccgattgaaggggccatgtttgagtgacaccaactgtggctttgtttgccgcaccgaacgtttcactcgaagacac

SEQ ID NO: 52503 - DNA, 340 bp, Glycine max
  Clone ID: LIB3167-026-P1-K1-H11
cccacgcgtccgtgctacttttgcaacagggatagttcatggcctgcaaccagatgcattgatgatggttttgcctgcccttgctttgccttcgcgtttggctggtgctgcgtttctcatcatgttcttaattggaactgtaattgcaatgggaagttataccgtgtttataggttcgtgtagccaggcactgaaagatagagtacctaagataactgagaaactcacttgggtttcctcccttattgcaatagccctcggatttgctatcattattagccagttttttgggtttagtctgtattaaaacatctttaataagaaaggtactttttttctt

SEQ ID NO: 52504 - DNA, 228 bp, Glycine max
  unsure at all n locations
  Clone ID: LIB3167-026-P1-K1-H12
cttgcctgaagtgaaggaataatggaaagatttcatgaggaagaaanngaagagccagtgagtccaacagggcaatacttgacaagctcttcactaagtgtgtacattcttggtgtcttggaaagtgagggtcccattgatgactcttaaaccgtgccacttcttcagaatctctttctttccatcaactcacgtttcttcttcatcatgattagggacaaaaatggg

SEQ ID NO: 52505 - DNA, 301 bp, Glycine max
  unsure at all n locations
  Clone ID: LIB3167-026-P1-K1-H2
gagaacttcacaatcaccacttggaatgatttgttttccagtccaggatttgctgatgtaatgatgagtatgagggtggatgtatactcggtaaccttttagaggctacacttttttgagatttaatcatggatattttttagacaagttttggaaatgtattgtgccctcaatgataatgtttagcaaaaataacttagttgaaaactgaaaagttaagtaaaaattgaaaagtatttttttaattggaaattgttaagttggtttattgaattnaaaaaaaaaaagggtagattataat

SEQ ID NO: 52506 - DNA, 209 bp, Glycine max
  Clone ID: LIB3167-026-P1-K1-H3
gttatcctccataagaaatactatctcttgtttttgtgttggcctaacctatacctaccttaaccacgggggcgataccgcggtttttaatcgccatacttattgcgtttgacccggcgggtaatcgcgcctggacaactgccttatgcggcacttttggggggttcgcttatcgccggtcaatcttatgggagcactttagatctgtc

SEQ ID NO: 52507 - DNA, 350 bp, Glycine max
  Clone ID: LIB3167-026-P1-K1-H4
cccacgcgtccgcccacgcgtccggttgagaactaagaaggagaagcaaatggcgtcgtcaatgatctcttccccagctgttaccactgtcaaccgtgccggtgccggcatggttgctccattcactggcctcaagtccatggctggcttccccaccaggaagaccaacaatgacattacctccattgctagcaacggtggaagagtgcaatgcatgcaggtgtggccaccagttggcaagaagaagtttgagactctttcctacctgccagaccttgatgatgcacaattggcaaaggaagtagaataccttcttaggaagggatggattccttgcttggaattcgagt

SEQ ID NO: 52508 - DNA, 299 bp, Glycine max
  Clone ID: LIB3167-026-P1-K1-H5
cccaacgcgtccgcttgctggttgatcatcagggaatttacaaatgctcgaaggatgcgtacaagaagtatatcaagaaaacttttgcagctcatataatttgacattatctaaatccactgagtccaccaaacatgatatttcctcggtttttttagaaatggggccaaattaatcaaaactcggatgccctgtgttattttgggccctcgttttaataattggaaagtgtatcaggtcgaatatgaatttgaagcgtccataatgtacaagatgctattgcaactgcgtttaagatg

SEQ ID NO: 52509 - DNA, 345 bp, Glycine max
  unsure at all n locations
  Clone ID: LIB3167-026-P1-K1-H6
gagtttgttgtgagctataagctagtttatcgtgaggagaatatgaagttgtgggttgtgctttgttgctgcagtagttttggtagcatggccatgccatggcgcaggctaccaaaggttccctctccgaatgaaaactggctatggtgagcgttcttcggaggtaaaatgcgcaagttttaggctttntttntttgcacacaacatccgaacctttaaaaccattcctgaagagtgcgttgaaccaacaaaggacttcattaatggcgaaccatttaaatcagactttaaaacagttaaccaacaagctttcttttatgctagtgaacccgaaggccatcacaa

SEQ ID NO: 52510 - DNA, 376 bp, Glycine max
  Clone ID: LIB3167-026-P1-K1-H7
gattttacacaactgcgtccacaggtttgtgaatcctgacataaacatggatcccggtcgctccactccgaagaaggttctcaatattcgagaaaccgccacgtggcttctggaagcagcaagtttggtctagaaagatcccaaggagtcggtccgaacgaggatccacccccttccttgacgaacacagagacgtgtgttttggattctatttgtgccgtggtttgagatttagatgcaaataaatatataccctgtcttgtgccgtgtcccctttaagccaattgcaatcaaacaaagtttcggttattggtgttcatttttcttccttcatctttctctaaaacattaattgaactctccattccttaaattt

SEQ ID NO: 52511 - DNA, 367 bp, Glycine max
  Clone ID: LIB3167-026-P1-K1-H9
tgattacgaaaatgtggaagagaacgggttttgaagaagaagcagttcaatggatcaactcagatttcagggacctaagtctagctgctaatagactcgcccatcatgccatcaaacttggtggcattggctttggagcctcttttttcggattgtttgctgccattgctgctatttatctgttgattttggatcgtacaaactggaaaacaaatattctcacagcactactcattccatacattttcttcagcttgccttcattaattttcgacgtcttcaggggagagcttggaaaatggattgctgcagttgctgttgtattacgccttttccttccaagacactttcctgattggctggaatt

SEQ ID NO: 52512 - DNA, 300 bp, Glycine max
  Clone ID: LIB3167-027-P1-K1-C2
gagaacttcacaatcaccacttggaatgatttgttttccagtccaggatttggtatcgaatgatgagtatgagggtggatgtatactcggtaaccttttagaggctacacttttttgagatttaatcatggatattttttagacaagttttggaaatgtattgtgccctcaatgataatgtttagcaaaaataacttagttgaaaactgaaaagttaagtaaaaattgaaaagtatttttttaattggaaattgttaagttggtttattgtattgaaaaaaatgaaggaaagaaaagtaa

SEQ ID NO: 52513 - DNA, 369 bp, Glycine max
  Clone ID: LIB3167-027-P1-K1-F9
ctagttctagatcgcgagcggcccccctttttttttttttttttttttgttcggttttttttttttttttttttttttttttttttttttttttttttttttttttttttttttttaaaaaaaaaaaagaatttgtttaataaaaaaaaatttttttttaaaaacaaaaaaaaattaatttaaaaaatatgaaaaaaaaaaaaaatcaaaaaatctttatttaggggggggccatttttaacttttataaaatgaaaaaaaaaaaaaggggcaggaagaaaaaccaaaaaataaaaactaatcttatattgtttttaataataacaaaaacacttgcataaaaaaaaccacttttatttatgaaaaata

SEQ ID NO: 52514 - DNA, 390 bp, Glycine max
  Clone ID: LIB3167-028-P1-K1-A1
cccacgcgtccgacaaacccactaagatggcttcctttgtatccttcctagtgctgcttcttgcagcccttatcctcatgcctcaagggcttgctacttactacaaaccaattaagaagccaccagtgtacaagcctccagtgtacaagccaccagtgtacaaaccaccggtttataagccaaaaccaccggtttacaagccgaaaccaccggtttacaagccaccatataagaagccaccatacaagaaaccaccttatggaaagtaccctccagtagaggacaacacccatgcctaaagcaagcaatgaggtctattatctacttaataaataagacgaactgctttgtgttttctagcattgtgatttacaactttcgagcaatgca

SEQ ID NO: 52515 - DNA, 166 bp, Glycine max
  Clone ID: LIB3167-028-P1-K1-A10
aagggtctgaattttatacaatgatttttaagatacatgtgtagaacagtttgttaatgctgtgttgcgaattgttggttggttgttaatgtgatggtttatgagcagaatcgaaaggcatcaaccaacttcaagtaacatcataaaatgttttctgtgtttgact

SEQ ID NO: 52516 - DNA, 339 bp, Glycine max
  Clone ID: LIB3167-028-P1-K1-A11
gttgccattctcatcctcctctgtctctctctctccaccattgccatggatccttacaagctccggccatccagcgccttcaattctcccttctggactacaaattctggtgctcctgtttggaacaacaactcctctttaaccgttggagctagaggtccaattctgcttgaggattatcatcttgtggagaagcttgcaaactttgacagggaacgtatcccagaacgtgttgtccatgccaggggagctagtgcaaagggtttctttgaggtcacacatgacatttctcacctgacatgtgcagatttccttcgagccccctgagttcagacgcct

SEQ ID NO: 52517 - DNA, 402 bp, Glycine max
  Clone ID: LIB3167-028-P1-K1-A12
gctaagaggcgcagccgtagcaaaagctcgtggaattgctagcaatggcgaggatcaaggtttacgagctgaggcagaagacgaaggctgatctgctgaatcaactgaaggacctgaaggcggagcttgccttgctcgtgttgctaaggtcaccggtggtgcccctaacaagctttccaagataaaggtggtgaggttgaacattgcccaggttttgacggtgatttctcagaagcagaaggctgcgttgagggatgcctacaagaataagaagtacttgcctctcgatctccgccctaagaagaccagggctattcgcaggaggcttactaagcaccaggcatcattgaagacagagagggagaagaagaaagagttatatttcccactaaggaaatatgc

SEQ ID NO: 52518 - DNA, 411 bp, Glycine max
  Clone ID: LIB3167-028-P1-K1-A2
cacgcgtcggcccacgcgttggtccacgcgtccggataactagaaacagtgtgatgaaaatgaaggtccttgttttcttcgttgctacaattttggtagcatggcaatgccatgcgtacgatatgttccctctccgaatgaacactggctatggtgcccgtactccggaggtgaaatgcgcaagttggaggcttgctgtggaagcacacaacatctttggctttgagaccattcctgaagagtgcgttgaagcaacaaaggaatacatccatggcgaacaatatagatcagactccaaaacagttaaccaacaagcttacttttatgccagagacctcgaagtccatcccaaggacacatttgtgttcagtatagatggcaccgtactctctaatattccatactacaaaa

SEQ ID NO: 52519 - DNA, 402 bp, Glycine max
  Clone ID: LIB3167-028-P1-K1-A3
cttaactgtagaaaagaaaaaccgaagatgagcttgttgaatgaggagagaaaaccgcacgctgtggttactccatatccagctcaaggacatgtgaaccctttgttaaaactagcgaagctgcttcatctcagaggctttcacataacctttgttcacactgagtacaactacaagcgtttgctcaagtcaaggggtcctaatgcccttgatggcctaccagattttagatttgagagcatcccagatggtcttcctccattggatgatgataatgttactcagcacgttccctctctctgtgactctatcagaaaaaacttcctcaaacccttttgcaaacttgttcatagacttaaccactcttctgccactgagggtctcatacccccagttacttgt

SEQ ID NO: 52520 - DNA, 413 bp, Glycine max
  Clone ID: LIB3167-028-P1-K1-A4
ccacccttccggttggttgtgagctataacctagtatatcgtgaggagaatatgaagtggtttgtttcctgggtggctgcagaagtttgggtagcatggccatgccatggcgcaggctaccaaaggttccctctccgaatgaaaactggctatggtgagcgttcttcggaggtaaaatgcgcaagttttaggcttgctgtggaagcacacaacatccgagcctttaaaaccattcctgaagagtgcgttgaaccaacaaaggactacattaatggcgaacaatttagatcagactctaaaacagttaaccaacaagctttcttttatgctagtgaacgcgaagtccatcacaacgacatatttatattcggcatagataacaccgtactctctaatatcccatactatgaaat

SEQ ID NO: 52521 - DNA, 398 bp, Glycine max
  Clone ID: LIB3167-028-P1-K1-A5
aacatggttgggaccattggagaccaatggagcgatctcctcggaggccacagaggcgaaggcaggacctttaagcttcctaatcccctgtactacattcagtagttccttcacctctcaacaatctagcttgctcctatctatctatatgtaataagatgcgttcaaataggggcactagcttcactttatgttgtttcagctgtgtgtcaacaagtcatgtaagagacttcactatgttgttttctctttcgtggctttaataaattatgcgcccttgttccatactttattaaagccacgtaagagacttcactatgttgttttctctttcgtggctttaataaattatgcgcccttgttccatactttaaaaaaaaaaaaaataaaattaataa

SEQ ID NO: 52522 - DNA, 401 bp, Glycine max
  Clone ID: LIB3167-028-P1-K1-A6
gaaaaatcaagcgtacattttggctttcctagtttcgttattccttcttagttctcaagccgttatctcttgttttttgagtttgttctaattggtttttctttcgtgcccacctcatgttcttcttctacttttaagggtttgagaatggctcattacatttacagtcagttatcaaatgcctctattatcatatacccaaatctgcctcattatgtgttcacttgaaaaaaggcactagccgctaacaattggggaaattgccctctagaattaagttaatcatagtgatatacgtttagttttcggaagctgatccttgacttgggttgcttcataaaaggtttagatgcatatgatagtttgtactactgtccttgaaatgaagcatgaacgtgaag

SEQ ID NO: 52523 - DNA, 399 bp, Glycine max
  Clone ID: LIB3167-028-P1-K1-A7
gcgagttgttgtaaagctagccttgttgcagccatggccacccacgcggctctagcttctacaaggatccccactaacaccaagttcccatccaaggcttcacactctttcccaacccaatgcgcctcaaagagacttgaggtgacagaattctctgggctaagatccacttcatgtgtgacatatgctaacgatgctagagaatcttcctttttttgatcttgtagcttcccaactcactcccaagaccaatggatcatcaactcctgtgaggggagagacagtggccaagttgaaggtggcaatcaatggtttcggacgcattggtagaaacttccttcgctgctggcacggccgaaaagactcaccccttgaggtcgttgttgtcaacgacagtgg

SEQ ID NO: 52524 - DNA, 176 bp, Glycine max
  Clone ID: LIB3167-028-P1-K1-A8
cccacgcgtccggtcatttttgtatcattggattgattttaagaatattcctacatagatccgtccgtatttctatagctttcctacaaggcgtcttccttgtagaattgaatagaatgatgcattttagcttttggagaagttaaaagttaaagtatataaattgattttaattt

SEQ ID NO: 52525 - DNA, 395 bp, Glycine max
  Clone ID: LIB3167-028-P1-K1-A9
gtaactcgttcagattttggtttttgcttccctatccgctctctcttcttcacttgagtatggcggtggtaccttacaccaccggttctgcacctcttctgtttacaccagctacttttagtgatgccacaaagctctactccggattgaaacttcaagctgcgagtcctttcggagctgcaaaacctaacgtaaccgctgagttttatggaatagttcacaacactcttcactgtctgtatgctaaccacaatacatcaatggcacgtattcgaatgatgccaatagggactccttaagtcccctataggacacctggtgaaggaacttggcaatgggttgatgtatggaacgccctttatcgagaacgtgttatcttcattggacaagagata

SEQ ID NO: 52526 - DNA, 389 bp, Glycine max
  Clone ID: LIB3167-028-P1-K1-B1
agaagctaaagctggaggtgagggactcaggcttgcagactggtgaccctgctggcttgacccttgctgacaccttggcctgtggatctgttggccacatcattggggttggggttgttcttggtctcaagaacattggtgccctgtaaaaagcaactatataagtttagtgcttgatgcatctgtaatcaatgttattatgtacttcattttcacatcactctgcagtctttctcaaacttagcataatattcagtttctcccttttccctcctaatcccacactcaccccctcatacaaaaacaaaaaaagatctgttatggcaaatgatcaaatgctttgctatagaattgagcattcttgactcgatgcagaaaaaaaaataaaa

SEQ ID NO: 52527 - DNA, 402 bp, Glycine max
  Clone ID: LIB3167-028-P1-K1-B10
aaagaaagccctttcttttttcttttacctctctctctctctctctccttctgccaaccaacttcttctcctttttctgcaatgggttgtgctggatcttcacaatccaagcctgatggggctgtaaaaaaaatccggaaacctaagccttggaagcatcctcaacccataacaaagactcagctcacacaattacgtgatgagttttgggacacagctcctcactacggtggccggaaagagatttgggatgctcttcgagccgctgccgaggctgatctaactttagcacaagcaattgtggatagtgccggggtcattgtccagagttctgatttgacagtatgctatgatgaaagaggagcaaagtatgagctacccaagtacgttttgagcgagcca

SEQ ID NO: 52528 - DNA, 399 bp, Glycine max
  Clone ID: LIB3167-028-P1-K1-B12
agcgaaagcaatcccccacccctaattttgatttgtgtcgaggaaaggacaggtcttggaaccctaaccgcacctctctctttcttcccgtgtgcgtcaaagcgaagcaacgcgacacgatggtgttctacttcaaagcgcgccccgaagccggcgatttcaccatcttcatgggccttgacaagtacgagaacgaggaactcatcaaatacggttttcccgaagacatctggttccatgtcgataaaatgtcttcagcccatgtctatgtcaggttgcacaaaggccagaccatcgatgacatgagtgagggtttactggaagactgtgctcagcttgtcaaagcaaattcaattcaaggaaataaagtgaacaatgtcgatgttgtttacacaccct

SEQ ID NO: 52529 - DNA, 401 bp, Glycine max
  Clone ID: LIB3167-028-P1-K1-B2
cagttcttcatctgcacgacgaagacggtgtgtctcgacggaaagcacgtcgtgttcggacaggtcgtcgaggggatggacgtcgtcaaggagatagagaaggtcggatccagctccggcaggaccgccaagcctgtcgtcgtcgccgactgtggtcaactctcttagatagacgacgttgaccctaggcttttatctctgtgtcggtggctctgaatgtgtcgtttctttcggtgtcgtttttgccttttttttctctttcccatgtcgtttaggggattgcggtgttatggatatcatttcgaaacccttcccctttgaatccttcctttcctttctaaaatatcagtatcatgtggttcgttcatagagtgaatggagtctgttatgagaaacataaa

SEQ ID NO: 52530 - DNA, 402 bp, Glycine max
  Clone ID: LIB3167-028-P1-K1-B3
cctaattccgaccatggaagccacggcctccgcaatgagcttcgcccttccctcaacaaaagcccaagcccaagcccaactcctgacccggcccaccaatccattcaccattccctcccgcagcccagcccaccgccccccgccgcgcctccccaccatccgcgccgcaattccccgcacaaagaaagaggcaacggtggagactgtgcgggagcagctcgagaactgttacctcctcgccggcatcaactacaagggcttcacggtgaagcagttccaggagcttcgaaagacgctcccagaaacaacgaaactgatcgtggcgaagaacacgctcgtttacaaggccgtggaaggcacgccctgggagacgctgaagccctgcatgaagggcatgaacgt

SEQ ID NO: 52531 - DNA, 402 bp, Glycine max
  Clone ID: LIB3167-028-P1-K1-B5
ccacacgcttccgcccacgcgtccgcgcccttttttttttttttattggagtttctcatgcttgagaccgctacaccagatgcgaaagagtcccacataaaataactcgtatagaattggttgtcaagcttatcacgagccattttagccattttcaaggacttgaaacaatattgtgcttcatatgtgtcttgacttttttcaaattcattaaagaattcttcattgatggggattgtgtttgttgcatcaagaggaacaagggtaacaggtataccagaatgaatcacctggtatgctgcaaaagggtcaccaaatatattgaactctgcataagggttcgcttcataatttgtgaatacattgccacggtcaccacactgcccaggaatgcaagaaaag

SEQ ID NO: 52532 - DNA, 379 bp, Glycine max
  Clone ID: LIB3167-028-P1-K1-B6
atcgacagcgtcaattgaagaagatgccgatcagaaacatcgccgtcggaaggcctgaagaggcgactcaccccgacacgttgaaggcggctttggctgagttcatctcaaccttcatcttcgtgttcgccggctcaggctccggcatcgcctacaacaagctcaccgacaacggcgctgccacccctgccggcctcatctccgcctccatcgcccatgcattcgccctcttcgtcgccgtctccgtcggcgccaacatctccggcggccacgtcaaccccgccgtcaccttcggcgccttcgtcggcggcaacatcaccttcctccgcggcatcgtctacgtcatcgcccagctcctcggctccatcgtcgcctccct

SEQ ID NO: 52533 - DNA, 399 bp, Glycine max
  Clone ID: LIB3167-028-P1-K1-B7
cccacgcgtccgcccacgcgtccggggagtataattggggagggtacgttgaactcatggagatggcgaagaagcatggcctgaaggtgcaggccgttatgtcatttcaccaatgtggcggtaacgtcggagactcttgcactattcctttacccaaatgggttgtggaggagattgataatgaccccgatcttgcatatactgatcaatggggaagaagaaactatgaatatatatcacttggatgtgatacttcgccagtgctcaagggccgaaccccagttcaatgttatgctgatttcatgcgtgctttcagagacactttcaagcacctccttggtgacaccattgtggaaattcaagttgggatgggaccggcaggtgagctgcgttaccctt

SEQ ID NO: 52534 - DNA, 398 bp, Glycine max
  Clone ID: LIB3167-028-P1-K1-B8
gagaataggaaaaagggaaatatggcatttgcaggaacaactcagaagtgcatggcttgtgacaaaacagtttatctggttgataagttgacagcagataaccgagtgtaccataaggcttgcttcagatgccaccactgcaaaggaacactcaagcttagcaactataactcttttgagggggttctttactgcaggccacacttcgaccaactgttcaaaagaactggtagtcttgacaaaagcttcgaagggacaccaaaaattgctaaaccagaaaaaaccggggaagagaaacctgcagcaaccaaagtctcaagtatgtttggtggaactagagataaatgtgccggttgtcaaaaaacagtgtatcccactgaaaaggttactgtgaatgg

SEQ ID NO: 52535 - DNA, 367 bp, Glycine max
  Clone ID: LIB3167-028-P1-K1-B9
cccgcttccaagcccaaagctgctgcacctaagaagaaggctgttgccaagcccaaggccaaagctgcggccaccaagcccaaggccaagcccgctaaggccgcgccgaagaaggtcgccgctaagcctgcgaagaagactcccgtaaaggccgtgaagaagcccaagagcgtcgtgaagaaacctaaaagcgtgaaatctccagcgaaaaaggccaaggctaagaagtgagggattggagtgggttttagtttggcgttatagtggttatgtatttcgggttgaatcgtagtataagtggatatatttttagaagagtattgatgtaaattcctttgctagaaattttaacaagtggtcttctttt

SEQ ID NO: 52536 - DNA, 334 bp, Glycine max
  Clone ID: LIB3167-028-P1-K1-C1
ttctttttttttttttttatttaaaagctgctgctctttattagaaggctgttgccaagcccaaggcggaagttgttgctttttttcctggacccaagcccgctaaggccgctccgaagaagggcgccgctcaccctgtgcttgagactcccgtaaaggccgtgaagaatgggttgggctacccttgttttggttaatgtcgtcaagcttcgcggtagaagtgaaaggctgtattttgatggatggagtgggttttagtttggcggtatagggtttatgtatttggggttgaatcgtaatataggtggatatttttttagaagagttttggtgg

SEQ ID NO: 52537 - DNA, 399 bp, Glycine max
  Clone ID: LIB3167-028-P1-K1-C10
cccacgcgtccgaaacgaagtactactactagggaagaaaaacttagctactaaggaaggatcaaagagaatggctcaagcaatggcatcaatggctggcttgcgtggttcctctcaggctgtgttggaaggtagccttcaggtgagtggctccacacgcttgaatgtggggagtggaagcagggtggcctcagtcacacgtgcagggttcacagttagagcacaacaacaacaagtgagtggtgaggtacaaagcagccgtagggcagtgctttcacttgttgctgctggtttggccactggctcttttgttcaagctgtgcttgctgatgccaaatctatcaaagttggaccacctcccccaccttctggtggattgcctggaacgttgaactcaga

SEQ ID NO: 52538 - DNA, 392 bp, Glycine max
  Clone ID: LIB3167-028-P1-K1-C11
tggggtttctctcttcaaactagggttttacagaatataagctctctctatctttggttttcgtcattcaaatccaatccaatatcaaatatgagtcgtcatcccgaggttaagtgggctcagagacttgacaaggtctatatcacggtgcaattggctgattcaaaaaatgccaaggtggatcttacaccagatggtatttttaccttctctggtagtgctggtgctgaagaccatcagtatgagctaaaactggagctctttgacaaggttaatgtagaggagagcaaaattaatgtaggagtgcgaagcatattctgtgtagtgcagaaagcagaggatggatggtggaaaaggttactgcgtggagaaagcaagcctccacattatgt

SEQ ID NO: 52539 - DNA, 394 bp, Glycine max
  Clone ID: LIB3167-028-P1-K1-C12
cccacgcgttcgtccacgcgttcgcccactcgtccgagagaccagcttttgcttctttgtgaacatggagatgaggaaatcatgtggcttcttcttcttgctcctcctccttgtctttgcttcccaggtggtggtgcagacggagggaagagtgtgtgagtcacaaagccacgggttccatggtttgtgtaatagagaccacaactgtgctttggtctgcaggaacgaaggtttctccggtggcaggtgcaaaggcttcccccccccttgtttttgccccaggatttgttgagatcttaaaaaacacttctttggccgtgcaatttataaaatatttcgggcaaaaaattgcatctactctctatccacttgggagctagctaccacaaccaac

SEQ ID NO: 52540 - DNA, 380 bp, Glycine max
  Clone ID: LIB3167-028-P1-K1-C2
cctttaagggtaagggttccggttgggggatctatggttgcctctgcgatggatcgcaagaggggaaggcctgaagctgccttcaatttcaatggcggcgccaagaaatcgaggcctgaaacggactcctttccaactggtttaggaagcaaatcgaagccatgcacaaagtttttcagcacctccggctgtccatttggtgaaggatgccacttcctgcattatgttcctggtggctttaaagctgtctctcaactgatcaatgttggtagcaatcctgttactcctcaagttgggagaaaccctgttccaccatccttccccgatggatcttctcctccagttgttaaaacccgattgtgcaacaagtttaatacagc

SEQ ID NO: 52541 - DNA, 403 bp, Glycine max
  Clone ID: LIB3167-028-P1-K1-C3
gtccgccaccgcgtccgattgaggagtgggtcaaaattggcttgcctgcaaaggcaaaggtgaagacacaacatggggatgcaccttttgctgagttgtgctcacactgtgagaaggaagctgtgaatgtttcccttggaaaccttctaacatacccatttgttagagatggcttggtgaacaagacattgtcactaaaaggaggatactatgactttgttaagggatcttttgagctctggggccttcagtttggccttgcatcctctttctccgtatgaacatcaaccattatcaatgacctcatcttggttccctaagttaaagatgtggccaccattctgcattggaagctataggggccatgcttagaggtcgtgtgtatctgcaatgaagaggccta

SEQ ID NO: 52542 - DNA, 363 bp, Glycine max
  Clone ID: LIB3167-028-P1-K1-C4
gactttcttacgtacccctgggggctttgtccctaaataatacccatttggagggtgaattccctaaaaactggggcagttccccagcctaagtgataaacttagccaacaacaggttaagtggaagcatcccagcaggtttgggcttcatgggtcctaaaataaaggagattctgttcctcaataaccagttaactggatgcattcctgagggagttggactattcacagagatgcaagttctggatgtgagcttcaactcactcatgggtcatttgccagacacactatcatgcctgcaagacatagaagttctcaatttggctcataacaagctctctggggagttatcagatgtggtgt

SEQ ID NO: 52543 - DNA, 402 bp, Glycine max
  Clone ID: LIB3167-028-P1-K1-C5
gagatatcttaaaagtaggtgatgaagtgagggccaaagttgttggtattgattggggaaaatcaaggattaacctatcaattagacagctagaagaagatccactcttagaaactctggacaaagtaatacctcaggatggttcagctgatcctgattctatgagtggtggtgatagcggtagcattgagcctcttccagggcttgaaacaatccttgaagagctactacaggaagatggaatatatgacgtaagaatcagccgtcaagggtttgaaaaaagagtggtctcgcaagacttgcagctttggctttctaatgcacctcccacgaaccaaaggtttactctacttgcccgggctggaagacaggtgcaggagatacatctcactacatcccttg

SEQ ID NO: 52544 - DNA, 397 bp, Glycine max
  Clone ID: LIB3167-028-P1-K1-C6
aagggagagatttgtgatatcaatggtgtgtgtgttgatgctgctgaggatgagttcttcaggttgactaccaaggaaggaaagttgactgtggagagggatgttgtgaggactaaaaccatcgatttttcgccaattttgcagttcgaacaagacccggttcagatccttgatgcactgttgccactgtatttgaacagccaggttctgagggcattgcaggagtccttggcgagtgaacttgccgcgagaatgagtgccatgagcaatgccacggataatgctattgaattgaagaagaacttgtccattgtgtacaatagggagcgccaggctaaaatcactggtgaaattctggaaattgtggctggggccaatgccttgcaatagtgcagtt

SEQ ID NO: 52545 - DNA, 335 bp, Glycine max
  unsure at all n locations
  Clone ID: LIB3167-028-P1-K1-C7
ctccggctccttcaccgttgttaggacctcctgcgccacccaccggagctcctggacccagcgaggatgcttcttcccctggacctggcactgctgccaacgatgagagtggagcagagaccaccatgtgcttggagaaggttctaggaggcctagctttgggttgggctacccttgttttggtcttctagacaggctttgttgctgttattaaattcttgtatttgtatcatttatttcctttttttttcttttatcttttgagcctgtattgggtacacattacatttatttacattgttaccttcaaacccttnaaaaaaaaaaaaaatata

SEQ ID NO: 52546 - DNA, 388 bp, Glycine max
  Clone ID: LIB3167-028-P1-K1-C8
attttcttcttttttggtggttctagttgttaagggaagatattgtaaccatgaatgttgaagaagaggttcagcgtctcagccaagaaatcaagaggcttggtaaggtccaagcagatggttcttacaaggtaacatttggaacactatttaacgatgatgaatgcgcaaatatatttgaagcacttgttggaacactaagagcagcgaaaaagcgtaaagtactgacatacgagggtgagctactgctgcaaggagtccatgataatgtggaaatcactcttaatcctgcccctgctgaagcagccgcagcagctgccaactgatacaatggttacatgccacactgtatcctgtgcaacttgaaccaccaacctagttttatgat

SEQ ID NO: 52547 - DNA, 397 bp, Glycine max
  Clone ID: LIB3167-028-P1-K1-C9
cccacgcgtccgcagagcgaaaatgacatccaccttcgcgaccgtcgcaggactcggtggcgcattactgtcatccacctcatctcgtctcacctcagggtttgtgaaatccccagtgattgctaggaatcccttgaggcaagctgtggcaatgggaaatgggaggattacatgctttgagaggaattggctgcgggcagattacagtgtgattgggtttgggttgattggttggctagcaccctcaagcataccggctatcaacggtaaaagtctgactggcctcttctttgagagcattggtgctgagcttgctcactttcccagccctcctgcccttacttcgtccttttggttatggctggttacgtggcaccttggcttgttcattgtcctc

SEQ ID NO: 52548 - DNA, 397 bp, Glycine max
  Clone ID: LIB3167-028-P1-K1-D1
cccacgcgtccgtgaagaaatgcttcttcaaacgaggcaatttggcacagcgtgtccatgggtcagactcacacccgcaagcaaaagaaatagctcagtctcattgagaaggagcaattgtggcccaaaatgttcggtgtcccaattggaattgaagagtgagagtgagagcaaaacgaagccgtatccagcagaggcatcgaggaccataatggagttggctaaggtgggcacgctgtgtacgttgacccaagagggtttgccccttggtactggggttcgattcgcggttgaccctgaacatggcactcccttgttctgcttcaattccactgacaacactaacatcccctcttctcttcatgttcagtttgaacaatttggattgcgcactcct

SEQ ID NO: 52549 - DNA, 402 bp, Glycine max
  Clone ID: LIB3167-028-P1-K1-D10
cccacgcgtccgagataactagaaacagtgtgatgaaaatgaaggtccttgttttcttcgttgctacaattttggtagcatggcaatgccatgcgtacgatatgttccctctccgaatgaacactggctatggtgcccgtactccggaggtgaaatgcgcaagttggaggcttgctgtggaagcacacaacatctttggctttgagaccattcctgaagagtgcgttgaagcaacaaaggaatacatccatggcgaacaatatagatcagactccaaaacagttaaccaacaagcttacttttatgccagagacctcgaagtccatcccaaggacacatttgtgttcagtatagatggcaccgtactctctaatattccatactacaaaaaacatggatatg

SEQ ID NO: 52550 - DNA, 402 bp, Glycine max
  Clone ID: LIB3167-028-P1-K1-D11
ggaagaaagaatggcagcttgcactgtttactcaacacaatctctgagcacatattgctccatcttaaccccatcaaagacgcaactcagttttttccaccaaaagcaggtagttttctggaggaacagcatgaagggcagctgctgcagcagaagaagctatgtgataacatgtgcagcacgtgactcacagacagtggtgattggcctggctgcagactcagggtgtggggagagcaccctcatgaggaggctgaccagggtgtttggaggagcaacagagccaccaaagggtggcatccctgactccaacactgtcatcagtgacaccaccactgtcatatgcttggatgattaccactctctggacagaactgggagaaaggtgaagggtgtcactgc

SEQ ID NO: 52551 - DNA, 380 bp, Glycine max
  Clone ID: LIB3167-028-P1-K1-D12
cccacgcgtccgtaaaaaacagtgcaagtattcagagagattaaaaaagagacaagaatgtagctcgttcaaggaactcacaaactcaaccaggtttagtcgcgattactttttttcaaaaatgcacagtgctaattaaactaaatatttgagggttgcatctttgcattctgagatacattaatcacttcaaaaaggtctgaatgatgttgcaacaagcgactccagccaatcatcttatgtatgtgacccgacattccattcatacaagctgagactgtgcatggatcattccaagcttattgcttaaccttggagacgtttcatatgaccccataggtgaagagtggggctttatggtgctcttgccaacatatttg

SEQ ID NO: 52552 - DNA, 392 bp, Glycine max
  Clone ID: LIB3167-028-P1-K1-D2
atacctggaaccagggggatgaaattgaaggccctggttttcttcgtggctacatttttggtagcatggcaatgccatgcgtacgatatgttccctctccgaatgaacactggctatggtgcccgtactccggaggtgaaatgcgcaagttggaggcttgctgtggaagcacacaacatctttggctttgagaccattcctgaagagtgcgttgaagcaacaaaggaatacatccatggcgaacaatatagatcagactccaaaacagttaaccaacaagcttacttttatgccagagacctcgaagtccatcccaaggacacatttgtgttcagtatagatggcaccgtactctctaatattccatactacaaaaaacatggatatggggg

SEQ ID NO: 52553 - DNA, 399 bp, Glycine max
  Clone ID: LIB3167-028-P1-K1-D3
ttctgggggaagggaattccacccactcatggtctgcgaaagaatcaatggcatctactctcttcgcttgcccgtcgttgtgttcctcctcttcttctatattttctacttccgtcaaattctccttaaacccgaataaaatttctcttccgttcgccggaaacaaaaaacctctttcggctccaattcgaaggcggttcaatgtcattgctatggctccccctaaacccggtgggaaggccaagaaagtggttggaattataaagctggctcttgaagttgggaaggctacacctgctcctcccgttggccctgctcttggatccaagggtgtcaatattatggctttctgtaaggattacaacgctagaaccgccgacaagcccggtcatgtcattc

SEQ ID NO: 52554 - DNA, 395 bp, Glycine max
  Clone ID: LIB3167-028-P1-K1-D4
gttcccaagtgttcctgccaggaaagtgttcggtgagaaattgttttcccatgttgatacattcagcaaagacctgttcgtttcattgaaaggggatgctgtacagcaagccagtcccgcttttgaatacttggagaatgctcttggtaaatttgatgatgggccattcttgcttggccaattcagtttggtggatattgcttatattccatttgttgaaagattccaaattgtctttgctgaggtgttcaaacatgacatcacagaatgaaggcctaaacttgcaacatggtttgaggagttgaataagctaaatgcttataccgagactagagtcgatcctcaggagatcggtgatcttttcaagaaacgctttctgcctcaacagtgaacgt

SEQ ID NO: 52555 - DNA, 393 bp, Glycine max
  Clone ID: LIB3167-028-P1-K1-D5
ccgggttggaccaagccgtccgatcatgatttggcgtatttcgaatttagtatttattgaacaacactggctctttataatataaccgatccttaaattatggatctgaattattgtacaggttcttgatacggcgacgctcttgagtgaatcaagtaatccatatgtaatcgctctgaggagatcgtaggtaaactaccgatcaatcatcacaagcagatggatgtcggaaaaagactaacatcaatcgcactggttgacgcttgtatggcttcaaattagaagatgcccgctatctctccgtacaccccatagggctgaatctgcccaatctgagactagggtggagcgacataactgaagtctgcaagatgccatctgtaggctaaaagc

SEQ ID NO: 52556 - DNA, 404 bp, Glycine max
  Clone ID: LIB3167-028-P1-K1-D6
ggctgacttcatgaaaatgccattaccagacaacagttttgatgcagtgtatgcgattgaagccacttgccatgcaccagatgcttatggatgctataaagagatttttagagtgttaaagcctggtcaatgttttgctgcttatgaatggtgcatgaccgattcttttgatccccaaaacccatagcaccaaaaaaatcaaggcagaaattgagattggtgatgggctacctgacattcgattgactgctaagtgtcttgaagctctgaagcaagcaggttttgaggtaatatgggagaaagatctagcagtggactctcctcttccttggtatttgcctttagacaaaagtcatttctcactgagtagcttccgtctaactgctgtcgggcgacttttcact

SEQ ID NO: 52557 - DNA, 262 bp, Glycine max
  Clone ID: LIB3167-028-P1-K1-D7
cgtcccacccctccctcccggcatgcgtaaagaaatgcttaaaaaatcgaggcaacctgccacatggttttctttgcccaatctttggctggcaaggccgtgaaattgctcactctcatcgacaaagtgcaatgggtcaccataatggaagacctccaccaagcaggcctcctccggaagccaatggtacggcccataccgcgtcaagtccttggtccgagaccatagtggagcccggctaactacgctcactgccgagttc

SEQ ID NO: 52558 - DNA, 401 bp, Glycine max
  Clone ID: LIB3167-028-P1-K1-D8
cccacgcgtccgcccacgcgtccgctgacatgtcacagtacaagattggtaagttcatatgtggtaacaagcattgcaatgagaaagatgggttagcaagctatgaggtgaacttttattactttgaagctggagaaaacaaacaagccctagttaaattggtaacatgtgagagatgtgcattcaaactcaactacaagaggcagaaagaaaaggagcagttagaaaaaagacaacaagaacaggataggcgaaagaggaatcgttcaaagagtgatgatgatctagatgacttccaagaaagcaaagagagaaggcggaaagggaaaagggctttgacttcagccagtgatcataaaattgatgatgatgatgataacttggatgagtttcttgagggg

SEQ ID NO: 52559 - DNA, 393 bp, Glycine max
  Clone ID: LIB3167-028-P1-K1-D9
cgcgtcgctccgcaccagtttcaccgcacgaatatcttgttgtttggagcgatccgagaaaaactctgtaaacatgttggtttaccaggacctccttacaggtgatgagcttctctctgactccttccgttacaaggaaattgagaatggaatgctgtgggaagttgaggggaagtgggttgttaaaggagcagttgatgtagacattggtgcaaacccttctgctgagggtggaggagaagatgagggagttgatgatgcagctgttaaggttgttgacattgttgacacattcagacttcatgagcaacccgcattcgataagaagcagtttgttaccttcatgaagaggtttatcaagaatttgactcccaagctcgatgcagagcaaca

SEQ ID NO: 52560 - DNA, 398 bp, Glycine max
  Clone ID: LIB3167-028-P1-K1-E1
cccacgcgtccgtatttatttacttttgggtctaaggtttaaggttttttttttttttttcatttaggtcactaaatccgcaatcatgaagctcgataccaccggtctcgaatcgtttcccacactgcttgcgcctcaaaacgacgtcgttggagaactctccgccgctccatccttcgaccttccgaattccaacgatttcgatgggtttgtgaaagaagctattcagatggtgaagcccgcgaagggtactacgactcttgcttttatatttaaggagggtgttatggtagctgctgattctcgagctagcatgggaggatatatatcatcgcagtctgtgaagaagattattgaaattaatccgtatatgcttgggacaatggctggaggtgctg

SEQ ID NO: 52561 - DNA, 403 bp, Glycine max
  Clone ID: LIB3167-028-P1-K1-E10
cccacgcgtccgataaactccttcctcatttctcatttctcattcaacaccatggcaagaaaaaccaagtccattttcttggccttcttactactatgctctttctcactgggggtagtggtagtagcccaagaggaggcaatagcaaaatccgaaagtgaagcattaggggaaccagagaaaagagaaacacttgaaatcatcattggtggaggtggttcacctgctccttctccctctccccctacatattgcccacctcctccaccaaaaccactgagccggttggagaaagcaaaacgtgttcttctcaaattcaaaaccacaatcgacgaccccaattgttacacgcaaaactggagccaggacacagacgcgtgtaaattcaatggggtacgatgcg

SEQ ID NO: 52562 - DNA, 131 bp, Glycine max
  Clone ID: LIB3167-028-P1-K1-E11
gtccctgcagaaaccatgtattattttcctgctgagaatagagccaaattctggtataaagcagattatggcctgtttcgtttctgcatagcagatagtgaacatgactggagagaaggacattttaacac

SEQ ID NO: 52563 - DNA, 393 bp, Glycine max
  Clone ID: LIB3167-028-P1-K1-E12
cccacgcgtccgcccacgcgtccgaggctggctaccacacatgggaaaaattaattctcaaggatccacaagatccttccactccaaatgcagtttcatacaaaacagcagcgagagagaaactgataaggcagggatacaacattgttgggatcattggagaccaatggagcgatctcctcggaggccacagaggcgaaagcaggacctttaagcttcctaatcccctgtactacattcagtagttccttcacctctcaacaatctagcttgctcctatctatctatatgtaataagatgcgttcaaataggggcactagcttcactttatgttgtttcagctgtgtgtcaacaagtcatgtaagagacttcactatgttgttttctctttc

SEQ ID NO: 52564 - DNA, 395 bp, Glycine max
  Clone ID: LIB3167-028-P1-K1-E2
aaaaaaccgtcacttcctccgttaaggttatggtttttcgcctcttcggaagggagagacccgttcactccgttttcggcgccggaaaacctgctgatgtgttattgtggaggaacaagaaaatttctgctggcatgcttggcggagccactgctgtttgggttctttttgagttgcttgagtatcaccttcttactctggtgtgtcacattttgatactgttgctcgcagttctgttcttgtggtccaatgcccatactttcatccacaaatctccacctcgcattccggaatttcatcttccagaggagccattcctgcaagttgcgtctgcattgagaattgaagtcaaccggggatttgctgttttgcatagtattggctctggaagggac

SEQ ID NO: 52565 - DNA, 392 bp, Glycine max
  Clone ID: LIB3167-028-P1-K1-E3
ttggggggtagtcccacgcgtccgacctttcttccgttcgacggttagctgtaactgggcggatgggtgctgcttacctgattgcgaacagggacgggaggaagcccaccacgaaggaaagcatcatcgatgttcctatggcttctcgcttgctcttcaggggtttcagctgtgccgatggtgtctaccgataactcatcaacgggcgcctcattgccaaggatgtctagataagagagggtggatggctacattggaggaacgcccggtcaatttgtatcaagctgggatctttacgcgctctttttgtaattactttttttataaatggtacatgatatgatgtaacctaatgcatgtgaaccacaatgaacctcatcctccaattcaat

SEQ ID NO: 52566 - DNA, 404 bp, Glycine max
  Clone ID: LIB3167-028-P1-K1-E4
cggacgcgtgggctctgagccccaatctcttgagcagcagaatcttcaggccaagccaggtaagcaagcacaacacaaccccgaaatggcttctgcttctgttcccatggctttctcgctgagctctgttatcaacaacaacaagccttcatccgaagccttcttcaggccactacccctacggcaaccaaagaggaccctcttcaccacaaaggcagtgtcaaactccaaggctcaaatcaatgcatctttgaaggagaaggcagttgcaggactcacagcagcttctgtgacagcatctatggtggttccggaggtggctcatgctgctggatatgagttctccccttccctcaagaactttctgctaagcatctttgctggtgggtttgttctagtagcca

SEQ ID NO: 52567 - DNA, 411 bp, Glycine max
  Clone ID: LIB3167-028-P1-K1-E5
acccttccggtttggaaggtacgaaagatggaaccctgttcatccaactcatggagccttttggggaatgggtgtgggcgttggttgtggtgtcggatggggtcctgggtttggccctgaagtgataggctatgttggagctggttgtggcattggattcaatgtaggcatcacttttgctggtgttggagttggcctacctgctaattttatctttgaaggtccatataatggggttagctggattggaaatttaccttgtatctctgacttgcaaagagaagccaatggaaaattgtttgaatttaggcaaaagcatttatcaataaagggaattaacttctttgacaagaagaacagcttgcctttgctcacttctgccagtaaaagtatacaagcattccgtaacca

SEQ ID NO: 52568 - DNA, 400 bp, Glycine max
  Clone ID: LIB3167-028-P1-K1-E8
cccacgcgtccgcccacgcgtccgccctctcgtccgctcgccggttagctctaactgtgctcattggtgctgctgctgttggctccaaagtccaacctgctgatgcagcctatggtgaagctgccaatgtgtttggaaagccaaagacagacacagatttcctgccatacaatggagatggattcaaactatctattccctcaaagtggaacccaagcaaagaagttgagtacacgggtcaggttgttagatatgaggataactttgactcaaccaccaacgtggttgtcaccatcactccaactgataagaagtccatcactgactatggttcacccgaagagttcctctctaaggtggattatttactaggaaaacaggccttcttcggcgaaacaca

SEQ ID NO: 52569 - DNA, 243 bp, Glycine max
  Clone ID: LIB3167-028-P1-K1-E9
gtttgagcattattgacgctcaagttgatccatctttaagcgattagctaaaagtggaaggaaaaaaaaacaaaaggctcatgtgtaatgcttgaggctgaggttccagtacgttttaatgtttttttcccttaaggatttgggtcttgtcaaatgaggaaaagtaaaggaaataattttagttgataacgagaaaatcaaccgatgaaattttattacatttgtaatttactataattttgt

SEQ ID NO: 52570 - DNA, 361 bp, Glycine max
  Clone ID: LIB3167-028-P1-K1-F1
aagagttctaacggggttaaccccaccaggttgcaatttaatgtgacagcatatggcagcaatgtgaatatctcaacaggagtggttaatgccacggtcacgggagttgtgtactcagataaggtgcttgcagtctatcatgtggacaaggtgcttctccctttggatttcctcaggcctaagccaccagctcctgcaccctctcccgcaatggcgccaaaagctgataatgataactcatctgctgatgctcgccttggaacatccaaggacagcgctgatgcaagcagtttgataagtactcgaggaatgacattgctgtcctttggagttgctttagttgcattggtgtttattgcaa

SEQ ID NO: 52571 - DNA, 401 bp, Glycine max
  Clone ID: LIB3167-028-P1-K1-F10
gtatgatgtcacccctttcatggaggatcatcccggaggtgatgaggttttgttatctgcaacagggaaagatgcaaccaatgactttgaagatgtggggcacagtgattctgctagagatatgatggaaaaatactacattggtgagattgatgcatcaaccgtcccactaaaacggacctacattccacctcagcaagctcagtacaatcctgataagactccagaatttgtgatcaagattttgcagttcctggtccctctcctgatcttgggcttggcctttgttgtgcgacactacaccaagaaagagtagagttgttccttctttatcacattggacaatggtgaagggtctgttagctattttatagtgtcatttaaaggacagtgtttagttt

SEQ ID NO: 52572 - DNA, 356 bp, Glycine max
  Clone ID: LIB3167-028-P1-K1-F11
cccacgcgtccgtgaagctcctgcggaggaaacataacagcgcttgtttgggaaccctagtttggcaaacatttcaagaatcagagtcttttaccactctcagtccaagggactgcgtatttggtgattccgttcaacaggtttagcattattatctgaaatggcatcggtgtctagtcagcaacagttccgttacacgcagccaccgtcaaaggttcttcatttgagaaatttgccgtgggagtgtacagaggaggaactaattgagcttgggaagccatttgggaaagttgtgaacacaaagtgcaacgttggagctaatcgtaatcaaacttttattgaatttgcagatttaa

SEQ ID NO: 52573 - DNA, 398 bp, Glycine max
  Clone ID: LIB3167-028-P1-K1-F12
cccacgcgtccgcccacgcgtccgcagcttctgagttctaagctaagtctgcttttagtgcttttctctcccgttatatatatagtatttgcttatatatatatatactactcattaggaactgtgattgcagttcctaatgcagattttaacgcggcgccaaggagcatttttgtgcttctggttgtctgtgctttttgtggtagtagacttttgctatggtgaccatagtacagtcgaggtagtagggttgggagaatgcgcagattgcaaggagaaaaacattcaaactagccaggctttctcaggtttacgtgtgacagtagactgcaaggcagcaagtggaaactttgaaaggagaggggtcggtgagcttgatgaatatggaaacttcaaag

SEQ ID NO: 52574 - DNA, 393 bp, Glycine max
  Clone ID: LIB3167-028-P1-K1-F2
attggaaataatgtccgggttcatccacaagattgaggagaccctccatgtgggagggcacaagaaagaggagcacaaaggagaacaccatggtgagcacaaaggtgaacacaaaggagaacaccatggtgagcacaaaggtgaacacaaaggagaacaacaccatggggagcacaaggagggacttgtggataagatcaaggacaagatccatggtgatggccatgacaagggtgagaaaaagaagaagaaggacaagaagaagaaggagcatggacatgaccatcatggtcatagcagcagcagtgacagtgattagatcttatatgttaagcaggtgtacggtacgatggtagtgaggagccagaatccctcttcctgctttatgatata

SEQ ID NO: 52575 - DNA, 156 bp, Glycine max
  Clone ID: LIB3167-028-P1-K1-F3
cttaactgcataaattttagagaaaactttttaaacatgtcgttttatcaggaccttcttacaggtgatgagcttctttcggactccttccgttacaatgaaattgagaatggaatgctgtgggaagctgatggagaagtggtttgctaaagtagc

SEQ ID NO: 52576 - DNA, 382 bp, Glycine max
  Clone ID: LIB3167-028-P1-K1-F4
ccaacgcgtccggatgaacttgagatggatggaagcggtgctgccgctgggaatcatagcgggaatgctctgcgtcatgggaaacgctcagtattacattcacaaatccgcgcatggcagacctaagcacatcgggaacgatatgtgggacgtggccatggaacgaagggacaagaagcttgtcgagcaagcctctccctccaattaacatcgttgttttgccaatgacattgtgaagaaaataaactgctcacctggatttacgactgtgttctagggaagcagggttaatcacaagaatcaaattccgtctgttttcttgtatgcaattcaacataagatttataaatatatctatgttccaatcgcaattactttcgct

SEQ ID NO: 52577 - DNA, 208 bp, Glycine max
  Clone ID: LIB3167-028-P1-K1-F5
gttttagtaaatgatgcggaaaagggtagtgacattgatccacaagaagcacagcaaactcttgaaatagcagaagctaatttgaataaggcggaaggcaagagacaaacaattgaggcaaatctagctcttagacgagctaggacacgagtagaggctatcaatgtgatttcataacaagttgatgcgtccgaatatcggaataact

SEQ ID NO: 52578 - DNA, 399 bp, Glycine max
  Clone ID: LIB3167-028-P1-K1-F6
aacacactcacacttttcttctggctttcgatctaacgcgctgccgcgcatggccgagtcccacagaacccgaccctcccgccggcagcccagccgcctgcagagccgcgccccgtcgtcgctccagataaaccgcaccgtcgagtggaacgtcgcgatcccgctgctgtccccgctggtctcgtcgccccctccgccgccgcagaaggacgagccgtcaccgccgcagcaacaacgcccgccggaaaaagttgtcttcaaaaagtggcagcaccccgccgcaccgttttgctacgaaccaccttcgcgggttcctcctttcgttaacgtgtaaataataaataaaaaaatgaagaaaaattatgaatatttcttctaacatcttttgttcattttcat

SEQ ID NO: 52579 - DNA, 397 bp, Glycine max
  Clone ID: LIB3167-028-P1-K1-F7
attgcttttaatggaggttttaatcagccaattatgtgcggtggtgagccaagggccatgcttagaaaagatcgaggcaaagctgatgccccaatatattccattcagatatgcattcctaagcatgctttgaacttgatcttttcatttacaaatggagtagactgggatggtccatatagactacagtttcaagttcccaaggcattacaaaacaagccaattgacttctttaataagggcttggctgaggaactgagtaaagaaggagcatgtgagcaagcaatatttccagacacaaataaaattataaccaaatgtgctatgattggtaatttgtcaaaagaagggggtgatcgctgcgatctgaattttgttttaggatgcacagatccta

SEQ ID NO: 52580 - DNA, 284 bp, Glycine max
  Clone ID: LIB3167-028-P1-K1-F8
agaaacagtgtgatgaaaatgaaggtccttgttttcttcgttgctacaattttggtagcatggcaatgccatgcgtacgatatgttccctctccgaatgaacactggctatggtgcccgtactccggaggtgaaatgcgcaagttggaggcttgctgtggaagcacacaacatctttggctttgagaccattcctgaagagtgcgttgaagcaacaaaagaatacatccatggcgaacaatatagatcagacttcaaaacagttaaccaacaagcttactttta

SEQ ID NO: 52581 - DNA, 387 bp, Glycine max
  unsure at all n locations
  Clone ID: LIB3167-028-P1-K1-F9
ggggacaagttgggagaacctgtgtggttcaaggccgggtcccagatcttaagcgagggtgggctggactacttgggcaacccaagccttgtccacgcccagagcatcctcgccatctgggccacccaagttatcctaatgggtgctgttgagggttatcgtattgctggtgggcccctcggtgaggtcactgacccaatctaccctggtggcagctttgacccattgggccttgctgatgacccagaggcttttgctgagcttaaggtgaaggaactcaagaacgggagattggccatgttctctatgtttggggttcttgttcaggccattgtcaccggtaagggtccattggagaacctngctgatcaccttgcggacccagtc

SEQ ID NO: 52582 - DNA, 414 bp, Glycine max
  Clone ID: LIB3167-028-P1-K1-G1
gaccaagccttccgttttgggattcctaaaagccaatttaattcaatttgaaccaaaacttcctgattggaaggtttcagcaatttcagaccttggtgtgggcaatgaaaataagattgccctaagatttgacaaagtattttggcctaatgtagaactcttgggcactgttgctccgacctcttatacctgtggctattttctcaatcttcacaaagcaacaggccatcctgttcttgtctacatggtagctggaaggttcgcttatgacattgagaagctatctgatgaagcagccgcaaattttgtaatgcaacagctcaagaagatgtttccaaattcttctaagccagttcagtatcttgtgtctcgatggggaacggatccaaactcccttggatgttactcgtatga

SEQ ID NO: 52583 - DNA, 404 bp, Glycine max
  Clone ID: LIB3167-028-P1-K1-G10
caaagacaaatcctttttgtatctgtagctggaattttcttccttcttactttaccttcgattgtcaccttctaattctgcaacaagttccaaaccttcaaatctcactgccccaaaaatcctttcttttttaaatagccatttgacttcagcctctacagcagagtcccagatctctgcattccaattcccatggcaggtcgctatgacagtaaccccttcgatgaggaagaagttaaccccttctataatcctggaagtgttcccgctgccactaattcaaggctttcacctctgaagccagaacctgttgattataattatggctttggtgcgacagttgatatacctcttgattcatcaacggatttgaaaaagaaggagaaggaacttcaagccaagga

SEQ ID NO: 52584 - DNA, 359 bp, Glycine max
  Clone ID: LIB3167-028-P1-K1-G11
cccacgcgtgcgcccacgcgtccgattcacagctgtcacgccgtgaacggaaaatggcaacggctagacgcagtttcccgcctatcaccgaatgcaacggaacgacgccgtgcgagtctgtggccgtcgacctagacggtacgctcctcatatcccttacgttcgtcatcatcggctacctattcatctccgaatctctcggcatccagatcctcatgttcatctccttgtccggcctaaagatccgggacatcgaactcgtctcacgcgccgtcctccctaggttttatgctgcggatgtgaggaaagagagcttcaaggtgttcgaccggtgcaagaggaaggtagtggtgaccgct

SEQ ID NO: 52585 - DNA, 353 bp, Glycine max
  Clone ID: LIB3167-028-P1-K1-G12
accacgcgttcgcccacacgtccatccactcgtacggatacataactcgaccttccatgatgaacgggctaacatgggcaatgcaccggtgctgcccgagactaccaagaatttcaacacgctgctgtatacatggcttcaagattatgtccttgtcgggaagaacactggacatacaagccgtttcagatgcaagctgaaagcaggctggctaccacacatgggaaagatcaattctcaaggatccacaagatccttacactcgatatgcaagcgcatacaaaacatcagctagcgagtaactggtcaggcccggatacaacattgccgggatcattggagaccgatggagc

SEQ ID NO: 52586 - DNA, 399 bp, Glycine max
  Clone ID: LIB3167-028-P1-K1-G2
aaacaccgcataaagctctccccccaaaattttttaatcccatccgacgacactgctcatggccctcatttaatctctctctgtctcgccggggacaggcacgaagaaaagcaatttacaggaaggttatacaacatggtcaatgccactaaaggagtctttatttcctgtgacatacctatggcacaatatatcatcaacatgaatgcttcattgcctgcatctgacaagttcattatacatatattggataatacacatatgtttgtccaacctcatgttgagcaatgatacgaagtcgaattgcaaagttcagagaggacaatacatatgtcaagcctaattgattccgaatggctacagtgaatattctggaacattttatgttgattagtaatt

SEQ ID NO: 52587 - DNA, 356 bp, Glycine max
  Clone ID: LIB3167-028-P1-K1-G3
ccatttttcacaccaccaacacaggatgtttctccacattgggttcctccttttccttctctcatccacttcccatgccactgtccaagacttctgtgtggcagacctcaaaggtgcagacacccctgcaggctacccctgcaagccacctgctaatgtcacttcagatgactttgtgtacactggcttagctgaagctgcaaatgtcacaaacataatcaatgctgctgtgaccccagcttttgttgctcaattcccaggtctcaatggccttgaactatctgcagcaaggttggaccttggtcctagtggtgttatcccactccacactcatcccggtgccaatgaactactca

SEQ ID NO: 52588 - DNA, 394 bp, Glycine max
  Clone ID: LIB3167-028-P1-K1-G4
cttcggaaattggcttcaacttttgcagttccaatggctatgccagtaacttatgctagccagaagagggtggtgcctagctcggatgcattcttcaagccactgcctctacggtcttccaaggcagtgacagcatcaaaactcaatggaaggtttcaagtgagggcctccatgaaggagaaagttgtgacggggctcaccgcagctgcattgacagcttcaatgatggttcctgatgtggctgaagctgccgttacaccttctctcaagaacttcttgctcagcatcgcggcaggtggagttgttgttgttgccattattggtgctgtgatcggtgtttccaatttcgatcccgtcaagcgtagctgatggagttctgaggcactgtgtttta

SEQ ID NO: 52589 - DNA, 404 bp, Glycine max
  Clone ID: LIB3167-028-P1-K1-G5
tacctggaaccggggggtggaaaatgaaggtcctggttttcttggtggctacaattttggtagcatggcaatgccatgcgtacgatatgttccctctccgaatgaacactggctatggtgcccgtactccggaggtgaaatgcgcaagttggaggcttgctgtggaagcacacaacatctttggctttgagaccattcctgaagagtgcgttgaagcaacaaaggaatacatccatggcgaacaatatagatcagactccaaaacagttaaccaacaagcttacttttatgccagagacctcgaagtccatcccaaggacacatttgtgttcagtatagatggcaccgtactctctaatattccatactacaaaaaacatggatatggggtggagaaatttaac

SEQ ID NO: 52590 - DNA, 152 bp, Glycine max
  Clone ID: LIB3167-028-P1-K1-G6
tttttttttttataactaaataaaatatggatatatggtataatatatatgtagacatcaaaatgaataaactgtatgattttcacagatcaaaaaaaaaaagattaatccttgagtgttctgagtccgtagactacccttgccctactacc

SEQ ID NO: 52591 - DNA, 396 bp, Glycine max
  Clone ID: LIB3167-028-P1-K1-G7
cggacgcgtccgcccacgcgtccgcccactcgtccggcaaacttgttccccaatgttgatagtacttggaaaacattcaatgagttacaaaaactgcttagtaagactaatggccaagttgtcggtgacttgatgactccaactccacttgttgttcatgaatcaactagtcttgaggaagctgctaggctgttacttgaaacaaaatatcgtcgactacctgtggtagatgatgatggaaagctggttggacttattacacggggaaacattgttaaggcagctctactatcaaaacgtgctggatagtggtgattgtctttgtgaaaagttattcaaatagatttgcttgaaggttgtgctggcgacggtcagcgtaacctctatattattagc

SEQ ID NO: 52592 - DNA, 400 bp, Glycine max
  Clone ID: LIB3167-028-P1-K1-G8
ctcagaagtgaccccaatatacttagccatatctttacttcccaaaacttgctctacaatgagtttccttcgttcttttgcaagaaacaagaatatatcaaaagtaggacgcagaggtatccattgcatgcagaaactatgtgcagaaaaaatatctcctgattcactagagaaggcccaaaatcgtgtgatagatgctgcactcacacttgttcgagaaaatacaaggcttaagaaagaactcgtgcatagtttgggaggtgctgtggcaacttcaactcttcttggagttcctttgggtcataattcatcgtttcttgaagggcctgcatttgcacctcctttcattagggaaggtatttggtgtggtagcgcaaactccacaactgaagaaggaaag

SEQ ID NO: 52593 - DNA, 142 bp, Glycine max
  unsure at all n locations
  Clone ID: LIB3167-028-P1-K1-G9
tctttatagatctggtgcgtagaggctcagatctacggtaccgaggtgtgtgagtcatgttcgtcttgcttttggaatctgtttcgtagaaagtcgtttggtcttgcatatggcatggcgtcttgaggtattnntttttgca

SEQ ID NO: 52594 - DNA, 403 bp, Glycine max
  Clone ID: LIB3167-028-P1-K1-H1
ttccgaaattctttccaagtgctgcttttgcgaattgaacctcaaaatcagtctctaatatttttctcactgtcttgtctctccagagaactgtatagagagagatggcagctgcaacatctggtgctgtgttaaatgggttgggatcttccttcttgagtggaggaaacaggagccaaacccttctggccactgctattggaggcaaagttggtgctgctgctgttactgttagtcctagaagactcattgtggtagctgctgctgcaccaaagaagtcatggctccctggtgtcagaggtggtggcaacctcgtcgacccagaatggcttgatggatcgctaccaggtgactatggctttgacccactaggccttgggaaggacccagcattcctcaaatg

SEQ ID NO: 52595 - DNA, 383 bp, Glycine max
  Clone ID: LIB3167-028-P1-K1-H10
ggaagcacgacgacaacaacactcgtcctcacaccgactgccaccgcgtccaaagatgattgatgatcaagatctgggtttctttgccaattttcttggcgtcttcatctttgtactggtcatagcgtatcattttgtcatggctgacccaaagttcgaaggaaactaggaatgtagactgaggtgctttgcaaatggaaatgaatttgatgcaatcaagaactgtagtttgggaatgtgaacgttaagcttactaaaactttcataaacatcaaaggagcataacatttcaattttcgctatacttatgcgtgctcccttaagttatgttttgcagttaaggaactttcgttgatagactaatgaaaacactgaatttgctt

SEQ ID NO: 52596 - DNA, 385 bp, Glycine max
  Clone ID: LIB3167-028-P1-K1-H11
gcgaagagaatggctcccaagggtttaatctttttggctgtgttatgcttctcagcactgtcactgagtcgttgtcttgcggaggataatggacttgttatgaacttctacaaggaatcatgccctcaggctgaagacatcatcaaagaacaagtcaagcttctctacaagcgccacaagaacactgctttctcctggctcagaaacatcttccatgactgtgctgttcagagttgtgatgcttcactgttgctggactccacaagaaggagcttgtctgagaaggaaacagatagaagctttgggttgagaaatttcaggtacattgagaccatcaaagaagctttggaaagggaatgcccaggagttgtttcctgtgctgata

SEQ ID NO: 52597 - DNA, 407 bp, Glycine max
  Clone ID: LIB3167-028-P1-K1-H12
gggtttttgagtgcggtgcggcgatcctagcactctcttctgcagctttcgccgacagcttcattcaccatggctgagcaaaccgagaaggcttttttgaaacaaccaaaagtgtttctcagctcgaagaaaactgggaagggaaagagacccggaaagggtgggaaccgcttttggaaatccattgggcttggatttaagactcccagggaagccatcgaaggaacctacattgacaagaagtgccccttcactggcaatgtttccatccgtggccgtatcttggctggaacatgtcacagtgctaagatgaacaggactattattgttaggaggaattatctccattttatcaagaagtaccagaggtacgagaaaaggcactccaacattcctgctcatatatt

SEQ ID NO: 52598 - DNA, 192 bp, Glycine max
  Clone ID: LIB3167-028-P1-K1-H2
cccacgcttccgggctaaaccaacattggttggaagatgcctttcatgtaaaagtccacttaggcaatgtaagatgtaacacactgttcaattcgctgattttttgtgtttcccagtgcaaattttctgtgatttgcacaattttgtgcaacattatgtaatatgttctagtggaactattttccgatcctc

SEQ ID NO: 52599 - DNA, 403 bp, Glycine max
  Clone ID: LIB3167-028-P1-K1-H3
ccgggcacgcgtgggcgcacgcgtggaaagaattttaagtgaggagctagagaatgatgatgaagtctgctatgtgtgcagtggtggttgtagcacttcttcttctggcggaggtggggcccatggctgaggctgtgacatgcaccccaacagagttgagtccgtgtcttccagcaatcacttccggtgctaaaccttccaatgcttgttgcacgaagctgaagcagcaaaaaccatgcttatgtggctacctcaaaaacgctagcttgaagcagtatgttaactctcctaatgcccgaaaaaccgttgcttcttgtgggattccctttccaacttgttaattaattaagccttcttataattaaagtgtgggatatatatatatatatatatatatatatat

SEQ ID NO: 52600 - DNA, 422 bp, Glycine max
  Clone ID: LIB3167-028-P1-K1-H4
attggtggtcgcacgcgtccgctggttgggaaactgctatagaagtgtacggatctcatccatcggggcatagcttgtttttgcgatgggttggagatacaacgctggattgttcctcatagtcactgttgttattatttgggtcacctccgccgaagttacccaggatatttttacagattataagcagccatttgcagtaacatatcttggagcttctcttatggtagtttacctcccaatagcattcattaaggactggttctgtaacttgcttaaatcccgctcctctaaaagtggtaaaaatgcagaatgcgtggatgagttttctgtcaggattagctctcctctcaaaagcaatggagtgcagaaaaactttgaactggaattggggagtgtgaatcgaaaagatagtgatttag

SEQ ID NO: 52601 - DNA, 307 bp, Glycine max
  Clone ID: LIB3167-028-P1-K1-H5
gcggcgaacaggtcgtcgacaactaagatggataagcaaacggcttcctcaatgatctcttccccagctgttaccactgtcaaccgtgccggtgccggcatggttgctccattcactggcctcaagtccatggctggcttccccaccagaaagaccaacaatgacattaccttcattgctagcaacggcggaagagtgcaatgcatgcaggtgtggccaccagttggcatgatgaagtttgagactctttcctacctgccagaccttgatgatgcacaattggcaaaagtagtagaataccctctta

SEQ ID NO: 52602 - DNA, 426 bp, Glycine max
  Clone ID: LIB3167-028-P1-K1-H6
attgctggtcgaccacgtcgtcccacgcgtccggctccaagaaggaggagagtgcacttagcaacaacaagagcagagaccatgactactgtcatagaaaaactgggcattaagattgagaggaaccctcctgagtccaagctcactcaactgggtgttaggcaatggcccaaatggggttgccctccaagtaagttcccatggacatatgaagccaaagagacttgctatcttctggaaggaaaagtgaaggtctttcctagtgggtcgaatgagtcagttgaaattgctgctggtgacttggttgtgtttcccaaagggatgagttgcacttgggatgtgtctgttggtgttgacaagcactataattttgaataaatcctacaaggggtgccttatgaatgaagaagaaacagaacttccatg

SEQ ID NO: 52603 - DNA, 373 bp, Glycine max
  Clone ID: LIB3167-028-P1-K1-H7
atcgcgagcggccggcccttttttttttttttttttattttttttttaatttttattgggattatttttattatttttaaaattataaagaaaaatttttttttttttttaatttattttttattaatttaaatattttttaaaaaaaaaaaaaccaatctaaaaaaaaaacttaaacaaaaaaagtaaaaaaaaaaaacccaaaactaataaaaaaaaaaatattataaaaaaaaataaaaacccgaaaaaaattaaaaaaaaaaaaaactataatcaaaaaaattgaaaaaaacgaaaaataataccccacaaaaaaccaaatataacccaaaaaaaaaacctcttaaaaaaaaaaaaaaaatattccacc

SEQ ID NO: 52604 - DNA, 397 bp, Glycine max
  Clone ID: LIB3167-028-P1-K1-H8
cccacgcgtccgaaagatcagaagggctgttgaaggatctgaaatggttggaggaagaaggaaatatgattccgactcctggttctccagggcttacatatgccaaatatttggaggaactcgcagagataagcgcacccttgtttctctcccatttctacaatatctatttttctcatatagctgctggtcaggtcattggaaagaaggtttctgaagagctcttggaaggcaaggagttggagttttacaaatgggaaggagatgtacctgacttgttgaaagatgttcgtgataagctcaacatgctttcagagcattggtctcgagatgaaaagaatagatgtttaaaagaaactacaaaggcattccggtatatgggacaaattgttcgtct

SEQ ID NO: 52605 - DNA, 382 bp, Glycine max
  Clone ID: LIB3167-028-P1-K1-H9
gttaagtctgcaataattaaggctgcagagtcaatggctactgcatgtatcaatgaacatatgcgtattgcattcagggaagctggagcaattaagcatttagtaaggcttttaaattgcgatgataatgcagtccagttggcagctacacaagctttggaaaggctgtccgttagcaatattgtttgccgggttattgaagctgaaggggttttaggtcctttagttagtattttgaaatgctcagagatagctggaactattgtggaaaagtctttgaacatacttgctcggatattggaccccagtaaagagatgcaataaaagtcttatgatggaccagctaatgaatctgaaaggcatttggtgagcaaaagtgact

SEQ ID NO: 52606 - DNA, 359 bp, Glycine max
  Clone ID: LIB3167-030-P1-K1-A1
acccacgcgtccggggcgcgtggggtggaactgttcaagattttgtttagatgggccatggaaagcttgagggggctctaaattaactcctagatcaaagcgctcctgtgcttacaacgtgaaagcgacacgatcaactacgaagacgctgtaactgacaagggcaacatggagaccctcattcacaatggtcgttacgacctcacattgccatctcttcccatcatacaggtcgcattagcctcagaggccgattacatagagagagtgcgagaagcacaaacagcaattgagcttacacacgcgatttgtgtggacgcgaacggattgcatttgatggcagatcatcttcacttaac

SEQ ID NO: 52607 - DNA, 402 bp, Glycine max
  Clone ID: LIB3167-030-P1-K1-A10
cccacgcgtccgcccacgcgtcctattttagatgattttgatggggagctggggccggggtacctgagctttgtgaagggtgtgatcgattcagatgaccttcctctcaatgcttctcgggagatccttcaagaaagcagaattgtaaggatactgagaaagagacttgtcaggaaggcatttgatatgattcaagaccttactgaacgtgaaaataaagaggactacaaacaattctgggagaactttggtaggttcataaaattaggttgcattgaagacactggaaatcataagcgcattacaccattattgaggttttacacttccaaaagtgaggaggaacttaaaagcctagatcattatgttgaaaacatgggagacaaccaaaaggctatcttt

SEQ ID NO: 52608 - DNA, 308 bp, Glycine max
  Clone ID: LIB3167-030-P1-K1-A12
aacaaatcaaagacatggacatctccaatttcattatagaggtctacgactaggtaggcttctttgtggtgctacttaccaaggcacacttaaccgataccgcttattacaccttcaacaagttcaacctaatacaaccaaacattatgctccaaaaagacgctaggatctgatcctgtggggtgtgacaactaaccaaagatggcagcaacggggtgcacaccttgcaatctatcgcacgagccctttacgctgtcgcaatacagattagcgacagctgaaccggaagggtagccagctgcgctaca

SEQ ID NO: 52609 - DNA, 408 bp, Glycine max
  unsure at all n locations
  Clone ID: LIB3167-030-P1-K1-A3
cccacgcgnncgnccacgcgtccggacaggncctngaattttctttagaggtgaattcaggtctatcgggggagcttaatgaagctgctgatgatgcanaggacggcaggggagatggttccctcaattcaagcgacttcacagtggaacatgaagacaacaatcatgatgtaggagggtcactctcagcagtaccgcgggagctgttggattctgtagacgatgccattggcttcaagccctcgaatttcgatctcctacgccggaatttctcggcatccatcattaagaggttctctgctgtgggtgggaatggagtgtcaattgaagtgcaaggagaggctcttgacaagatcaccagcggagtgtggttaggccaaaccaccattgatgaatggatggacaaag

SEQ ID NO: 52610 - DNA, 387 bp, Glycine max
  Clone ID: LIB3167-030-P1-K1-A4
gcgtccgcccacgcgtccgcccacgcgtccgctttatcttttcttcacaaaatggcctcaactacgctagcaaccctctccctccgcaacctctcttatcctacaccctcctcctcttcttaccctacgcacctctccgccaacccctcctccctccaattccccaacttctcccaccgcgccaccaccacgcgccgcgcccgcgtcgtcgtcgtctccgccgtcgaggcaccggagaaaatcaccaagctcggcgacgaaatcgcgggactcacgctcgaggaagccaagaacctcgtcgacttcctccaggacaagctcggcgtctccgcggcagcgttcgcccccgtagccgtccccgcgggtgccgtcggcgccgtggcggac

SEQ ID NO: 52611 - DNA, 405 bp, Glycine max
  Clone ID: LIB3167-030-P1-K1-A5
cgttgagcgaggtgttgtcaaatcaaagcgatcaatatggcgacttaaaacaatcactgatgttttctgggccattgttaacttcataggcgtgtttttcgcaactatgttctcgatggaaaagtcagatgcgtacagaaaacgttctgtgggtaagaaatgggatggcggtgctcctggaggaggtcctggcggcggtggtggcggtggtagcggtccacgaggccctcctcgtgggggtctcgacaatgttcgtgggctagatagtataaggggacgtgatcatagttcactgcctgcatgtggttcctgctgtggctgattgttagagatccaatgtgtgtatatgccttttatatgttacggtttgtatctagtgttgaactggtgtaatatgtaaacatc

SEQ ID NO: 52612 - DNA, 411 bp, Glycine max
  Clone ID: LIB3167-030-P1-K1-A6
ccacgcgtccgcccacacgtacgggcagctgcttctcttttggtatgccaactcaagtccaccttcacgaaaggtcttgtagctcccaagggcctctctgcctcttcaccactccacctcctgccttctaagaggcaatttagcttcactgttagggccatccaatcagaaaagccaacctatcaagtgattcaaccaatcaacggtgatcccttcattggaagccttgaaaccccagttacatccagccccttgattgcatggtacttatcgaacctccccgcatacacgaccgcagtgagcccactactaagagggatcgaggtgggcctggcccatggctaccttctggtgggcccattcgtgaaggccgggcctctgaggaacaccgagatcgccgggcaagcgggc

SEQ ID NO: 52613 - DNA, 248 bp, Glycine max
  Clone ID: LIB3167-030-P1-K1-A8
gtttctttgcccctggaagatgttcaatttaatatgggaattgtacagctgggggctgaggcactgagccttacattgttgcccacaatttgatattgtcacatgcagctgctgttcaaagataccgagagaagtatcaagaaaagcaaaagggaaggattgggatcctcttggattttgtttggtatgaggcctttacaagatcaaaggccgacaatttagcagctcaaagagacagagactttcat

SEQ ID NO: 52614 - DNA, 419 bp, Glycine max
  Clone ID: LIB3167-030-P1-K1-A9
gaaaccccgcggcgacccacgcgtccgcttcaatttcccttccgatcatttttattcctcgagatttctttcgattgaacggatggctctcttcttcgccacgcactcttgtctctgtaagcggtgattttggttctggacaatgtctcgtgtttatgttgggaatttagaccctcgagtcagtgagagggacctcgaagatgaatttcgtatatatggtgttcttaggagtgtctgggttgctcgaagaccaccgggatatgcatttattgagtttgatgataggagggatgcacttgatgcaattcaggccttggatggaaaaaatggttggcgtgtagagctttctcataattccaagggtggtggccgaggagggcgtgggcgtggaggtgaagacacaaaatgctatgaatgtg

SEQ ID NO: 52615 - DNA, 296 bp, Glycine max
  Clone ID: LIB3167-030-P1-K1-B1
cgcccacgcgtcgggttattaactgccaaaggccgtgggcttgaggcttgatcatcgagggccacaaagtagtgccggctgattctcaacaagaaactgatttctgttcttcaacactcaatggactttccctaaactgcgactagaaagttcgcggaataagctacagactcgggagattatatcattcattaagagaataacatgtggaactcagaaactgacatgagtctgggcatgaagctgaagaagacaggtgatcttggaagcaatatctgcttgctttactgcacgtg

SEQ ID NO: 52616 - DNA, 191 bp, Glycine max
  Clone ID: LIB3167-030-P1-K1-B10
gcttatcattggtggtagggctgttgtttgtgcatatgagggtactcttggagagatggtgcataaagttatgcagaaagatgatgctggtgaccattttacagaaatggactagaacgtaagcggaaatatcctaataagaatcgtaagctagcagactgatattctagaaccatttactgacaatatgt

SEQ ID NO: 52617 - DNA, 386 bp, Glycine max
  Clone ID: LIB3167-030-P1-K1-B11
cccacgcgtccgggaatccgtatgcttatcgggcagcatgttgagttgcacaatcccaatcctcctccccatgttgtgggctatatacatacaaaaatgtctcctgtggaggtagcaaggaatgccagtgaggatgcacgtgctatatgttgtcgcgaatatggaagtgcccctgatgtgcatatttatggagatcctgattttacttttccgtatgttccagctcacttgcatcttatggtatttgagttggttaagaactcactgcgtgccgtacaagagcgttttatggattctgataaagttgcacctcccattagaataatagttgctgatggaatagaggatgttaccataaaggtctcagatgagggaggtggaattgc

SEQ ID NO: 52618 - DNA, 405 bp, Glycine max
  Clone ID: LIB3167-030-P1-K1-B12
cccacgcgtccgcaacaaatggcaaccattgtgatgaccactctcccccaattcagtggtcttagaccccaattctcagctgcccctgtgaagaacttggttgctgtgcaacccatgagtcgcaaggggaagggtgcattgggagctcgatgtgactacattggttcatccactaatctgattatggtggcttctacaaccctgatgctgtttgctggaaggtttggattggctccatcagcaaacaggaaagccactgcagggctaaagctggaggtgagggactcaggcttgcagactggtgaccctgctggcttcacccttgctgacaccttggcctgtggatctgttggccacatcattggggttggggttgttcttggtctcaagaacatttgtgccctg

SEQ ID NO: 52619 - DNA, 396 bp, Glycine max
  Clone ID: LIB3167-030-P1-K1-B2
ctctggtctactcactaaatgagactgaagtatctactctgatctgcgagtccaagctgttgaagaagttggatgcaataagatcaagactaacctctgtccaaaatgttatttactttgaagatgatagcaatgatgaagatgctttctcaggaagtttgagcaactggacaattgcatctgttagtgaagttgagaaactcgggaaagaaagtccggttcaaccaagcttgccttccaagaatgatattgcggttatcatgtacacaagtggtagtacaggtctgccaaagggtgttatgattactcatggaaacattgtagcaacaacagcagcagttatgacaattattccaaatcttggtagcaaggatgtgtacatggcctacttgcccc

SEQ ID NO: 52620 - DNA, 385 bp, Glycine max
  Clone ID: LIB3167-030-P1-K1-B3
aaaagcaatacacacacacactaactcttttatataaccacaacacccgatggcaacgggcgggagtttcatccccataatagatctaaacccccttttggctaaagcagatgatccaaaaatgactaaggatcctggagtgctcgaggctgataaacaatagcataaggctagtacacaggcagagttcttctacgtaaaacggcatagaaatcctgagactctccttaaagaacttacgagatgtaactcgcagatactatgaactctcatatgaagacaaggctaacatcaaaatgactccagccgcagggttcaaaaggtatcacaggctcggagaaaatataactaatagtgtacctgacatgcatgaatctatacattg

SEQ ID NO: 52621 - DNA, 347 bp, Glycine max
  Clone ID: LIB3167-030-P1-K1-B4
accacgcgtgcgaccacgcgtccgtgcatgcgtacgaactgataagggtataccaaaggcacagaccgggagagtgcatgaagataaatgctggcaaccaacacatgacgaaacatcaatcggtaacaaaacagtggatgagagtagtcgagaggagagacagactaagcacgacttacagagaagagtaaggtatacgggaaggatggactaaatgatactgacgagactgcagacctaaacaaccatgatactgtgtgacaggaagagatgcctgcatctaacagcgaggagaaactagggattgaggatgatggcaaattatgatcaagaatgatcaaaacaaa

SEQ ID NO: 52622 - DNA, 406 bp, Glycine max
  Clone ID: LIB3167-030-P1-K1-B5
acaaagtgctggagcaaacactaacacttacacaacaccaccaacaagaagaagaagaaacattcccagagacccttttgctctgtgaagccaaagttgctatcttttctcaaatggggacccgaatcccttcgcaccagctcagcagcggcctctacgtgtcgggtcgacccgaacaagtaaaagagcgtccgccgacgatgacgtcacgctctgttccgtacaccggcggcgaccccaagaagtccggcgagctcgggaaaatgttggaaatccccggcgtcgagccgaaaccgtcgcgtccgtcgtctgggtcggtgagatccgggccgaactcgggcccggcgggagggaggctgagcgggtcaaggcccatgtcgcgaaagtcgtccggttcgggtccgat

SEQ ID NO: 52623 - DNA, 356 bp, Glycine max
  Clone ID: LIB3167-030-P1-K1-B7
accacaccaagggaaagaaaacttttttttaaaaacagatggctaacgcaatggggagggcaatacctattacaactgacaatacccccccatgctggataactcttaaattcactgggcctaaattcataagggtataccatacctcaaaaaccaacaactacataacatccattgctagtaacgggggaagagtgcaaggcatacaggtctgttctccagttgctacgaagaaggcctagacttttacatacctctcataactggttgatgcacaactgggaaagcaagttacttacaccactaggaacacatcgataactacattgcaatctgcattggaacacggtacttta

SEQ ID NO: 52624 - DNA, 394 bp, Glycine max
  Clone ID: LIB3167-030-P1-K1-B8
gattgttgtgactcgttcttcttcgtcgttatcttcttcttttgttgtttgtgtgtttgttttttctctcacctgaaaatgtcttgctgcggtggtaactgtggttgcggaagcgcctgcaagtgcggcaacggctgcggaggctgcaagatgtacccagacttgagctacaccgagtcaaccaccaccgagaccttggtcatgggagtggcaccagttaaggctcaattcgagagtgctgaaatgggtgttcccgctgagaacgatggctgcaaatgtggagctaactgcacctgcaacccctgcacttgcaagtgaggtgttggagagctaaagcttcaagcagagatggcccttagaaataatgataaaaactatatgtagtttcaaaact

SEQ ID NO: 52625 - DNA, 387 bp, Glycine max
  unsure at all n locations
  Clone ID: LIB3167-030-P1-K1-B9
gaccacgcgtccgnccancnnccccngcactaccttttctttctcnctccgnctctctctcggcccgctctttatcaattcacaaataaacaaaagcaccactgctagatagaagagagagaattaaggaaccagaaagataacatcaaaatcaataaacctaagatgctgctctgaaagagacctggttctgcaatgaagagaacaccaagcatgtccgaaatgaccttggatctgaacacagccgacgatgccagtcgctgcgccgaccaacaaagatcacgtgtagtgcccttctcagtagaagatcaaactacgaagatgttggcatcacccaaaatacttaaaagacattcttcagatttccgcgacacgcgacacttactt

SEQ ID NO: 52626 - DNA, 428 bp, Glycine max
  unsure at all n locations
  Clone ID: LIB3167-030-P1-K1-C10
gaaaccccgcggcgacccacgcgtccgcccacgcgtccgataacatgatgttttttctggccacagcacagttaggagaggggggtattgacctggagtctatagcaaacatagaagttacttcagatggtgccgctttgtttgatgatggagaagataaccacaatgattctgaagccaccaattgaaaaaatgagcttaacaaaaaaagtccatgatctaataattgatgtttttggtgggggggttaagtggataactcctaattgtgggaggagcaaataatgcaatgtttcaaggaagtttgctagtcaattggttgaggaattctcaattctacgtggtctatgtgattntctattgcatgccaacttgacagtgtatttatgtcttaactgaatttgtttccagcttgtggctattttatg

SEQ ID NO: 52627 - DNA, 404 bp, Glycine max
  Clone ID: LIB3167-030-P1-K1-C11
tgcattttagcaatggccaaatggatctcatttgctgctctttttgcaatactggtactactcatctctcctgagcttgcaagtgctgcccaacctagtcttattcttcaactcggccgaaaacttttccaatgcggcagcgccgccgtccctgttcgtggaaataccccatccaatggccgctcgtagaggatataccccaccaccaaaacacccactctatggctgaatatttgagatgttagcatccttctttaattttgggataaaaaaaatacttttaaagatgtataattgtgtgtcattactataatatatgtcatgtatgcttaatttcactgaaccatgtgtactactgcttatcggtcacgtccatttagtggccacacctgtatccagcgaat

SEQ ID NO: 52628 - DNA, 339 bp, Glycine max
  Clone ID: LIB3167-030-P1-K1-C12
cttcctcaccgattgctagaatggaatttcgatgctcagtcatctcttttaccattctcttctctcttgctgttgcaggagagagccatgtccatgcatcgctacctgaggaagattattgggaagctgtttggccaaacactcccattcccactgcactgcgagagcttctaaagcctctccctgcaggtgttgaaatcgatgaactccctaagcaaattgatgatacacagtacccaaaaacattcttctataaagaagaccttcatccaggcaaaacaatgaaagtacaattcaccaaagcgtcctatgcacaaccttatggtggatatacatggg

SEQ ID NO: 52629 - DNA, 411 bp, Glycine max
  unsure at all n locations
  Clone ID: LIB3167-030-P1-K1-C2
cccacgcgtncgagcaagatcactcctataccaataattatggttctttttcgaactgatggcgaacacgtccggaagtatccaccacctaaagtgatgcaggtcgacaagtctgcatggatgactgatgaagaatttgcaagagaaacaattgctggtttgaatccaaatgtcatcaagattattgaggagttcccactaagtagcaagctagatactcaagcctatggtgatcatacctgtataataacaaaagagcatttggagcctaacttaggtggtctcactgttgagcaggctatccaaaacaagaagttgttcatcttaaatcaccatgactatctcattccatatttgaggaaaataaatgcaaataccacaaagacttatgctacaagaaccatatttttc

SEQ ID NO: 52630 - DNA, 409 bp, Glycine max
  Clone ID: LIB3167-030-P1-K1-C3
ccacgcgtccgctccttctccccctcctccatcagggatttgtttcaaggacacattgaagctaggggggtgggctgatgttctaggacttgttaatgttgttgttggttcccctgtctctagcaagtgttgtgcattgcttgaaggtttggctgattcggaggctgcactttgcctttgcactgctattaaggccaatgttcttggaatcaacttgaatgtgcctatcacactcagtgtgctactcagtgcttgccaaaaaactgttcctgctggcttccaatgtgcatagaactccatcacatgctaggttcattccatcacctgtgtcctcaaattgttgttttgttttagttcttctttgtgctatgacacgtttcattttaataataagctaggtaaacacgtg

SEQ ID NO: 52631 - DNA, 410 bp, Glycine max
  unsure at all n locations
  Clone ID: LIB3167-030-P1-K1-C4
ccacgcgtncggccatttgnnagttaggttctgcacgttttgtttccagcgagtgttctttcttcgccgagcgctttaatttgcacacgctgcttcttcagcttgagaaatggcacaagaaacctttctattcacatctgaatctgtaaacgagggtcaccccgacaagctgtgcgaccagatctctgatgcagtgctcgatgcgtgccttgaacaggaccctgacagcaaggttgcctgtgagacatgcaccaagaccaacatggtcatggtctttggagagatcacaaccaaggccaacgtagactatgagaagattgtccgtgacacatgccgcgaaattggattcatctctgatgatgttggtcttgatgctgacaaatgcaaggtgttggtcaacattgagcagc

SEQ ID NO: 52632 - DNA, 422 bp, Glycine max
  Clone ID: LIB3167-030-P1-K1-C5
gccccacgcgtccgcccacgcgtccgcagcttttatggcattttttttgctgggaagggggcacctccaaggatatgatggaagcaacatgtagctgatgtccaaacagacatgttttgcacaaactagattcaagagttaatgtctcaactcaacttggaagtcttgaagattgctcatagttcttccaactttttggacttccttttaaactagagttacctgctaattgcaattgtgtgtgccagtgatagtgttagaatacaaggaacctagtcaacaaagtataatttgatatagcttgtgattttttggtacatgtataatttgataagttttgttctagacttttatcaagttctaggtgcataatgtttttcaatacgtagaatgtcctattttcttattcacttatacacacc

SEQ ID NO: 52633 - DNA, 415 bp, Glycine max
  unsure at all n locations
  Clone ID: LIB3167-030-P1-K1-C6
ccacgcgnncgnccacgcgtncgcttgacatccccttttttttttattctctttngaaacacttagaagggagggaaaaatgtctgcgttccttttgcttttcctagttttttcttctcagttgatcggtggactcaatacacctctaccatctccaatctatggaaacctcgtaaccattctcagcataaatcgaggtcttctaaggggtatcatatcagctgtagttcttgaccacttcgaaaaggctcttcaggcatgggataaaagtgcatcactagcaagttattttgatgtcatagcagggactagcacaggaggactcatgactgctatgctcactacttcttacccagacgacctcactcaccctctttttactacgagctagaatcataagattttataaaaaata

SEQ ID NO: 52634 - DNA, 394 bp, Glycine max
  Clone ID: LIB3167-030-P1-K1-C7
tctctctcccttagtcaaagggattcatttttcttcttcccaggttatttagagaagcaaaatggtgaagatttgctgcattggtgctggatatgtggggggtcctactatggcagtcattgcacttaagtgcccatccattgaagtcgctgttgttgatatctctaaatcccgcattgcagcctggaacagcgaccagcttcctatctatgaacctggccttgatggtgttgtgaagcaatgccgtggcaagaacctcttcttcagcactgatgttgaaaagcatgtctttgaggctgacatagtgtttgtctctgtcaacaccccaaccaaaactcagggtcttggagctggcaaagcagcagatttgacatattgggagagtgcagctcgc

SEQ ID NO: 52635 - DNA, 428 bp, Glycine max
  Clone ID: LIB3167-030-P1-K1-C8
gttaggaaaccccgcggcgacccacgcgtccgtgaaaaattcagcaaattctatgttggttttgaaaaaagattcaatttttatgcgagggttttgttcctttaggatttcagcatcagtggctacagcctgcatgcttcacggtgcaagcagccggcccgcaaccgcccgcaaatcctctggcctttccggaaccgtccgcattcccggcgacaagtcgatctcccaccggtccttcatgttcggcggtctcgcgagcggtgaaacgcgcatcaccggccttctggaaggcgaggacgtcatcaatacgggcaaggccatgcaggccatgggcgccaggatccgtaaggaaggcgacacctggatcatcgatggcgtcggcaatggcggcctcctggcgcctgaggcgccgctcgatttcggcaatg

SEQ ID NO: 52636 - DNA, 307 bp, Glycine max
  Clone ID: LIB3167-030-P1-K1-C9
ccaactccatcaatcactcaaacagctcaagtcctcaaactacctgctggcgcctcataatctaccgaacatgcattgccagcaatcaacacggccgtaagagtaaggaccaccatatatgaaaacccttcaataagttcaaacctatgcatagcggcatacttcgcagcacctgcatctaccaaaaccatgacaacaccaacacccacaactccattcgatcaaagacccaccacttaacgaactaatccaacctatggactaatcaacaaccttgtaattacgatcctctagcgcctatatcacc

SEQ ID NO: 52637 - DNA, 397 bp, Glycine max
  Clone ID: LIB3167-030-P1-K1-D1
gttattcttttgaataacatccacaatttttatataagcagttatatgctgccaatcggggctgaaattgaaagagtgagcagctttggaacttatgctggctaaaacggaaatgttcaagcagggttcatggatcaagacatgaatgatgtttatgacattgggcaaatctgcgctagaaatgatcttgggacaaccaataatgttgcacaatgaacatgaaacactaaactatctgttacacgtgagcatctgaactgatgacatacatagacggagtattgaggacttacatgactacagggaatgagcagatgaatgattaatgactatgatggagatatcagtgaggtgtctttctggtgaatcaactgctaggacttctgaggaagatatt

SEQ ID NO: 52638 - DNA, 395 bp, Glycine max
  Clone ID: LIB3167-030-P1-K1-D10
ggtattttagaactggatccaattttgtttgattccgctgaaaagaacatatcggggggcatttgtttttgtggccgacgcacattctttacgatctcttgaaaaatcaattttcggatttgggatcaatccgaaatggagaacgtgaacaacatttttaagtccaatcgaaatacgtagcatctattgagggattggctgatcaagcttcgccaagggtgtttcaacatttagcgccacattcgctatatgcttagagtagaaaacaatgtgcacaaggcgattagcgaagcatagacaggaatgacatgggctctgcacatgcacttggtaaggaacttgtgagatctaagaaaacggtggaccgggtctatgaaaatgaagcacaaatgaat

SEQ ID NO: 52639 - DNA, 378 bp, Glycine max
  Clone ID: LIB3167-030-P1-K1-D11
aaaaaaaacactccatttccttaaaaaaaaaaaaaaaaaaaaaaagggaagggaaaaaaaaaaaaaaaaaaaaaaaaaaaaaaaaaaaaaaaaaaaaaaaaaaaaaaaaaaaaaaaaaaaaaaaaaaaaaaaaaaaaaaaaaaaaaaaaaaaaaaaaaaaaaaaaaaaaaaaaaaaaaaaagggggcccccccctaaaagaaacaaatttaaagaccgggaaaatccaaaataaaacttttttttaaagggcccccaaaaaaaaatcaatggccccggtgttaaaacagcggaaaggggaaaacccggggggtccccaaaaaaaatgcccttccaaaaaaaccacctttaccagcctgggaaatatacaaaaagcccc

SEQ ID NO: 52640 - DNA, 403 bp, Glycine max
  Clone ID: LIB3167-030-P1-K1-D12
cccacgcgtccggtttgttgtgagctataagctagtttatcgtgaggagaatatgaagttgtttgttttctttgttgctgcagtagttttggtagcatggccatgccatggcgcaggctaccaaaggttccctctccgaatgaaaactggctatggtgagcgttcttcggaggtaaaatgcgcaagttttaggcttgctgtggaagcacacaacatccgagcctttaaaaccattcctgaagagtgcgttgaaccaacaaaggactacattaatggcgaacaatttagatcagactctaaaacagttaaccaacaagctttcttttatgctagtgaacgcgaagtccatcacaacgacatatttatattcggcatagataacaccgtactctctaatatccca

SEQ ID NO: 52641 - DNA, 400 bp, Glycine max
  Clone ID: LIB3167-030-P1-K1-D2
ctagactcttccttttctcttctctgtctaaggggtgccctgagatcacattgaacaatggtgaaggctgtggccgttcttggcagcagtgagggtgtcactggaactattcacttcgttcaggagggaagtggtccaaccaccgtaactggatctcttgctggtcttaagcctggtctccatggtttccatgtccatgccttgggggacactaccaatggttgcctctcaactggatcacatttcaatcctaataacaaggagcatggtgcccctgaggatgagaatcgtcatgctggtgatcttgggaatgttaatgtcggtgatgatggtactgtcagcttcactattactgacagccagattcctctcactggaccaaacaacatcataggaaggg

SEQ ID NO: 52642 - DNA, 324 bp, Glycine max
  Clone ID: LIB3167-030-P1-K1-D3
tagcctgagggggatatgacacagaataagacacagtgtgagaaaaacgaaaaaatggaaggtgaagaaactgagatgaaacaacaatccaggttcaaaaggatttgcgtgttctgtggcagcagccctgggaacaagagtagctataaggacgctgctattgagcttgggaaagagtaggtgtcaagaaatattgatctggtttatggaggaggaagcattggtttgatggggttggcttcccaagctgattatgaaggagggcgccatgtaattggagttattcccaagacactgatgccaagagagaatactggagagaca

SEQ ID NO: 52643 - DNA, 417 bp, Glycine max
  unsure at all n locations
  Clone ID: LIB3167-030-P1-K1-D4
gccccacgcgtccgnccacgcgtccgtctagatccttctttttttttttgaactcaaacatggcagatgaggggggggtgctagatttctggccaagtccatttgggatgagggtcaggattgcacttgctgaaaagggtatcaaatatgagtacaaagaagaggacttgaggaacaagagtcctcttctcctccaaatgaacccggttcacaagaagattccggttctcatccacaatggcaaacccatttgtgaatccctcattgctgctcagtacattgaggaggtttggaatgacaaaaatcccttgttgccttctgacccttaccagagagcacaggctctattttgggctgatgatagagataagaaaatatatgatcttggaaggaagatttggacatcaaaaagagaag

SEQ ID NO: 52644 - DNA, 402 bp, Glycine max
  Clone ID: LIB3167-030-P1-K1-D6
cccacgcgtccgccaataataagctttttacctaaagaagaaagaagaacccatttatgatcggtggaaaaaatcccagatctcaaaaaatggaattttcgcagagtcacagggtagagatgataagcatggcagttgctcttgttgccattgttggtggcaccgcttactattactacgtcaccaagaagccaaaagggtgcttggatcctgagaacttcaaagaatttaaacttgttaaacgcactcaactcagccataatgttgccacgttccgatttgatcttcctactcctaagtcagtgttgggacttcctattggacaacatatcagctgcagagggaaggatagtcttggtgaagaagttgtgaaaccatatactcctacaacattggatactg

SEQ ID NO: 52645 - DNA, 397 bp, Glycine max
  Clone ID: LIB3167-030-P1-K1-D7
cgtggttccaatgcttacacattctcagttgatcaaggcaagacatacagattcgggatatcaaatgtgggactcaccacttccatcaactttagaatccaagggcataaaatgacaattgttgaggtggaaggaacccacactctccaaaacgtttatgactcacttgatgttcatctggggcagacttactctgtgttggttactgctgatcaaccaccccaagactacctcattgtcgtcacgacacgattcacctcccaagtgttgaatgctacctccatttttcgttacagtaactctggtggaggtgttactggccttttcccttgggggccaactattcaagttgattggtctttaaaccaagctcgctctcttaggaggaatctgacag

SEQ ID NO: 52646 - DNA, 379 bp, Glycine max
  unsure at all n locations
  Clone ID: LIB3167-030-P1-K1-D9
cggacccctgggttgctgcatttttttttttatgatggntgcttaaattacatcccgcacaatgatgaattcttgatacgctccattcgcacgaaagggtcatgccgtgggtgatattcctggagtcagattcaaggtcgtgaaggtttctggtgtgtctctcctggctctcttcaaggagaagaaagagaagcctaggtcttagtcttgtgggacgtgtcctctctagtttctccaaaaaaattattatgaattttacttcatgagactggatgagttctatggacaattttgtatctctctggctgcaatttttctgaactaaatttggttcatatctcatacttgggctccatttttatagagaatgctttgtgtg

SEQ ID NO: 52647 - DNA, 406 bp, Glycine max
  Clone ID: LIB3167-030-P1-K1-E1
gcgtccgaacaaactaattttatctgaaatatcttttttatagaacggagaaagacacgatgcaggaagcgacgaaggtgataataatcggtgccggaacttctggtatcgccaccgccggttgcttaacgaagcaatcaataccttacataatgctcgagagagaagactgtttcgcttcgctgtggcagaaatacacctacgatcgtctccaccttcatttgaggaagcaagtttgcgagttaccgcacttaccgtttcccaagtcttaccctcactacgtgcctcggaagcagttcatagactacttgggaaactacgttaaccactttgagatcaagcctctgtaccagcgtgcagtggagttggtggagtatgatggatggaaagggatttggagagtgaa

SEQ ID NO: 52648 - DNA, 405 bp, Glycine max
  Clone ID: LIB3167-030-P1-K1-E10
accactccaaacccaccacaccatcattattcatatctcattctctaacctttgactctgccttactcactctctactttgctcatcatcgtagatgaaccaacacttctagtctctcttactttataaccatgtaaaaatgagtcacctaatgaaaaattagtagcttcttgttgtgctttttattttgtttgtgttgagataaatttgtttgtttgtttggtattgttttgtgttttatgaattatttgatgggtgaagaaggagaagtggtgagaaagcaaggacaaaggggtgttggtggagataagtggtacttgtatagctgcttacaagactgtaaatattggtgctgtttaatacacgagactagttctctttcgatggtcccttttgagtgaaaaa

SEQ ID NO: 52649 - DNA, 407 bp, Glycine max
  Clone ID: LIB3167-030-P1-K1-E11
cccacgcgtccgcttctttctccaacttcacacacaaaaaaacatggcaaaggatagaacaattggtgtggctctagatttctccaaaagcagcaagaatgctctgaaatgggcatttgagaacttagccgataaaggtgacaccatttatgtcattcacatcaacccaaactctctagacgagtcccgcaacaagctatgggcaaaatctggttctcctcttattcctttggtagagttcagagagcctgagattatgaaaaagtatgatgttgaaattgatattgaggttcttgatatgcttgacactgcttcaagacaaaaagagatccacattgttacaaaaatatattggggggatgcaagagagaagcttttggatgctattgaagatctgaagctggatt

SEQ ID NO: 52650 - DNA, 394 bp, Glycine max
  Clone ID: LIB3167-030-P1-K1-E12
cccacgcgtccgatagcatcgtgtccttatccttatccttatcctgggcggcatgagttaccctcagcctcagcgtcagcgacagccagagtcgctgttccaatgccaaatctgagaggcaaagcggttgttggtgttggttccagaatgataaggtgcatggctaaccccagaagagttcaaatggtggccaagcaaattaggagagagctttctcatatgcttctcaccgataaagtcttgcagtatgctgttcttcccgaagcctccttaggagccgaccgttacctctcttctctcaccaccatcaccgacgtccaagtctccgccgacttgcaggttgttaaggtgtatgtttctgtttttggagatgaaagaggtaaagaagtcgcca

SEQ ID NO: 52651 - DNA, 398 bp, Glycine max
  Clone ID: LIB3167-030-P1-K1-E2
cccacgcgtccgcgctgctgcaagaatatatttaggcgttgacagttaaggtcactttcagtgatacataacaaaaaaggctgtaagaagcatttggttggtaagtattttgtaaaaatgatagatcatgcctgtctttttcaggtatctccatgtggagtcattgcaatgatctgctatgtatcatgtcacctttatctcagaaaaaaattatgagtttctgccttgttgacttgcctctatctgagccccctccccccaaatctccaatttttttccttttaaaaagggaatttttttcatagatgcctattggggttctatacatcctagtaaagaactaaagtccttctgatctagttgctgccgcagagcctagggctcgaatttctcacata

SEQ ID NO: 52652 - DNA, 120 bp, Glycine max
  unsure at all n locations
  Clone ID: LIB3167-030-P1-K1-E3
cacgcccgtccgggaacctaagaaaatccatacagatcttcacttaccatataaagaaaatcaatggcaagtggcctagtgcaggcaacctctttagccacaatcgactgnnttgtggcg

SEQ ID NO: 52653 - DNA, 190 bp, Glycine max
  Clone ID: LIB3167-030-P1-K1-E4
tttctacagccaatcacaatgacgacaggaacgacgaaccatttgaagaggcttaatgccccaaagcattaaatacgaaaccaacctaccgggacacatcctcctaagccctcatctgcaccacacaaatccacggaatgcccgacactcacactcattttgccaaaccggctgaagaatgctctaacat

SEQ ID NO: 52654 - DNA, 139 bp, Glycine max
  Clone ID: LIB3167-030-P1-K1-E5
ccacgcgtccgcaaattatgtgctagtatcagtatttttttgtttatatgctgctgcagtccggcttgggtgggctcttgaaactttcttgttgtacttaattgatgatcatgacaatctagtgctgttttaatgtgag

SEQ ID NO: 52655 - DNA, 213 bp, Glycine max
  Clone ID: LIB3167-030-P1-K1-E6
cccacgcgtccgttttgttgttgtggtgttttttttgtgaaactaacaacaacacagggccggcatcatggcagctgcttccccaatggcaagccaactcaagtccaccttcactaggactcttgtagctcccaagggcctctctgactattcaccacttcaccttgtgccttctagaaagcaatttagcttcactgttaaagccatccaatc

SEQ ID NO: 52656 - DNA, 401 bp, Glycine max
  unsure at all n locations
  Clone ID: LIB3167-030-P1-K1-E7
gacccacgcangcgagatnnnccaatccaccaactttttttttgataccaaaaanagcagacgggcccgcacctttcttattcattatcctctccttcccttcccttggcccaattgacaaatgaattccaacttcaatttctatttctatctcatcatcgtatccaacctttccaaatctcttaactaccagaaaaaccccaaaccaactttctcctattccttttcccaacccacatggacccaccgacccttccccactcataccacctactttccctgttggcccccttacatgttcctagacatcttttacaacatttcctcaaccccttaattatcttcctctttcaaaaacattcttatctttaattataaccctaactctttcctacattcct

SEQ ID NO: 52657 - DNA, 395 bp, Glycine max
  Clone ID: LIB3167-030-P1-K1-E8
ctttagaacaagcaaacacaactctgctaccctcttctctctctctcggatttcttgcgcggtttatcatgggggatagtcagtattcgttttctctcaccacatttagcccttctggaaagcttgttcagattgagcatgctttgacggctgtcgggtctggacaaacgtctttgggaattaaagctgcaaatggagttgtcattgctaccgagaagaaattgccatctatattggttgatgaagcatcagtccagaaaattcagttattaacaccaaatataggtgtcgtatatagtggcatgggtcctgattttcgagttttggttcggaaaagcaagaaacaagccgagcagtatcacccgttatataaagaaccaattcctgtcactcaa

SEQ ID NO: 52658 - DNA, 410 bp, Glycine max
  unsure at all n locations
  Clone ID: LIB3167-030-P1-K1-E9
gacccacgcgnccgctccaaaacaagcaaacacaactttggtctcttctgctctctctctcagatgcgcgcgccggtttatcatatctgatagtccataaccgtttcctctcaccacatatagccctaccggaaagcttgctcaaacacaacatgcttcgacggctgtcccatctcaacaaacatctataggaataaacgctgcaaatgacagttgtcattgctaccgagaagaaattgccatctatattcagttgatgaatcatcagtccactaaaatacatgtatcaacaccaaatataggggtcatatacagtatcattgttcccgatattcgagttttcgttcatacaagcacgaaacaagccgaacactatcaccgtacatataaagaaccaattcctggcactc

SEQ ID NO: 52659 - DNA, 404 bp, Glycine max
  Clone ID: LIB3167-030-P1-K1-F1
cgtccggttttgggtcttcaatgccgttggtggtgtttttggttctggacttggttcccctctgggggagcgtctctccgttgattatggcaagaaatcaaagcttggtttcacagtctacccctctcctcaggtgtccacctctgttgttgagccatacaacagtgtcctctccacccattctctcttggagcacaccgatgttgctgtcctcttggacaatgaagccatttatgacatctgcagacgctctctcgacattgagcgtcccacctacaccaacctcaaccgccttgtttctcaggtgatttcatctttgactgcttccttgaggtttgatggtgccctgaatgtggatgtgactgaattccagaccaacttggtcccataccctagaatccatt

SEQ ID NO: 52660 - DNA, 401 bp, Glycine max
  Clone ID: LIB3167-030-P1-K1-F10
ggctgctaagagcattgtggcatgtggtcttgccagaaggtgcattgtgcaagtgtcgtatgccattggtgtgcctgagcctttgtctgtgtttgttgacacctatggcactgggaagatccatgataaggagattctcaacattgtgaaggaaaactttgatttcaggcctggtatgatctccatcaaccttgatctcaagaggggtggaaataacaggtttttgaagactgctgcctatggacactttggaagagaagaccctgacttcacatgggaagtggtcaaacccctcaagtgggagaaggcctaagtaattcattccactgctctatgctggaagttttttgagcgttgcccttataatatgtctaatatccataactttccacgtctcttac

SEQ ID NO: 52661 - DNA, 405 bp, Glycine max
  Clone ID: LIB3167-030-P1-K1-F12
gcattaggccatgtgaccagcaatgtctcatttgctgcagttgctgtttctttcactcataccattaaagctcttgaaccattcttcaatgctgctgcttcacagttcatacttggtcaatcaatccccatcactttgtggctgtcactggctcctgttgttattggtgtgtccatggcatctttgactgagctctcgttcaactgggtcggcttcataagtgctatgatttcaaacatctccttcacataccgaagcatctattcaaagaaagccatgactgatatggacagtaccaatatctatgcctacatttccatcattgctctaattgtctgtataccacctgccgtaattttggaagggcctacactgttgaagcacggcttcaatgatgccattgct

SEQ ID NO: 52662 - DNA, 412 bp, Glycine max
  Clone ID: LIB3167-030-P1-K1-F2
cccacgcgtccgttctccctcgacccttctctttcaccattgggttacaactaccacttccgcacccagcgcgcgcgccgttctttccgctgctccttcgtcacacgctgctgtcgctgcttctgctgtttctactccttcccttaaactaaacaaatgcaccttcttttttttcaatcatcgctgctcaacacatgaaagcagaggaacaacagttacaaccttcgaagctttaccttttaggttctcggtcaaatccacgccatcaatggggagtgggaaaagcagagacatctcaaggttctctactgctgcaaagtttacgagtttattttaaaattagggtttttaactttggatttggggattttattgttttttagaattgttctattcaagcttggattacgat

SEQ ID NO: 52663 - DNA, 375 bp, Glycine max
  Clone ID: LIB3167-030-P1-K1-F3
ccacgcgtccgagaaaaaatgggagggtgtctaccatcctagctaaatccagaagataatggttcagctgccagcagtacaaatcgtttcatgctgtatgcgagagcactttcaatcacatggggagacactccagaatattggacatgggtacagcagaaagaagaagcaagtggcacgatagtagagttggctaagttgaaaagtgtttgctggctagaagtgcatgggaaatttgacactagaaagctttcagcaggaattctatatcaagtgttctttctaataatgttggaagaatcatctcaagggtgggaaggtccaataaatgttagatttgtccttcctggaggtaagagacatcatcatttagtt

SEQ ID NO: 52664 - DNA, 371 bp, Glycine max
  unsure at all n locations
  Clone ID: LIB3167-030-P1-K1-F4
cccacgcgnncgcccacgcgtccgaaaattgntgccattttttttcttgatgnnctttnctatccttgcgcaaggaatggcccaaatttccgtcaaaaggttctagagatgggtggcaaactgcagttcccctacatggttgacccaaacacaggcgcttcaatgtatgaatcagatgacataattcggtatttggttgacaaaaaccttgatctcaagaggggtggatctttataacttgggatttttaccacccttacatcctgtcctagagaagactcctactttacataggaagtcttctaatccctcaagtgggagaacgcctaaataattcattccactgctctatgctggaagttttttgagcg

SEQ ID NO: 52665 - DNA, 417 bp, Glycine max
  unsure at all n locations
  Clone ID: LIB3167-030-P1-K1-F5
ccacgcgtccgntcactcactggtcattttatgttttttttttttaccctcattcattctcagtctcgggtgggttcaacactctcagagcccttttctgctcccacgcatatgcataccgcacaaccacgatcacctttcgagtaatatggagatcacgagcagccataacagcggcagcatgatgtggtttttcaaagataagggctttgatgacaacagtgcacaaggaatgttccgaaagtgccggcgcctcgagggtgtgcaccaagaaagagcaagtgagaattgggactatttgagaagcattggcattgaggaaaggaagctaccctcaattgtttcaaaatgccccaaaattcttgcattggatctttatgagaagattgtgcccactgttgagtgtctcaggacatt

SEQ ID NO: 52666 - DNA, 335 bp, Glycine max
  unsure at all n locations
  Clone ID: LIB3167-030-P1-K1-F6
gcgnncggaaactgccaactccttacagaccttgtttttttataaaccgcgacaaacttgaaaggcggccggagtggctgtcaactctgactaatctgaaaacacttgctatatcagattgtccaaagcttatatctcgcctggataacatccatcacctcaccgcacttgaaaggttgagaatctccggttgtcctgaactatgtagaaaatgccagccccatgtcggtgagttttggtccaaaatatcacatatcaaagacgtcatcatcattgaagaaccataaaagctggaggaagaagacgacgaataggaattatttgttgagacatat

SEQ ID NO: 52667 - DNA, 141 bp, Glycine max
  Clone ID: LIB3167-030-P1-K1-F7
tcactccaagcaagaaatgtaattcagctagtgctggttttgcgccttacagttgagtggatctcaacatatatcttcagagtttcaaacaaggaaatgacatatgcacagcaactacatgattatgaaagcaaagtgatt

SEQ ID NO: 52668 - DNA, 399 bp, Glycine max
  Clone ID: LIB3167-030-P1-K1-F8
cccacgcgtccgctgtttcaccattatgttaggggttagcacacatgacacgggtagcgtgaactacgatggctttgtgaatgatgtggagttcggagatgtgttgctggttgatggaggaatgatgtctcttgctgttaagtcaaagacaaaagacttggttaaatgtgaagttattgatggtggtgaactgaaatctaggcgtcatttaaatgtccgtggaaaaagtgcaacacttccttccataactgacaaggactgggaagatatcaagtttggggtggacaatcaagtagacttctttgctgtctcatttgtcaaggatgctagagtggtgcacgagttaaaacactacctcaaaagtcataatgccgatatacacgtgattgtaaaaattgg

SEQ ID NO: 52669 - DNA, 360 bp, Glycine max
  unsure at all n locations
  Clone ID: LIB3167-030-P1-K1-F9
gacccacgcgtgcgggcgcntataaccatattaatctttattttgaggcgcaganatgaagaaagacccgcctttgtttaatttattgatcctccaaatgctaatgattctatatacaacctgtatggtcgtgatgtttaaggaagtcttattattgtggaatttgccaaggggggtcctcttagttcccgttaccgataatatatgtttctgtgttcacctcctggatctgggcgattctttaactgtggcatttatggtcatagggcccaaaattgcaaatccttgtattgtaagaacaagtgttaaccgttgttgtgaaagaggtcatatacaaaaaaactgtattaacagtcctaa

SEQ ID NO: 52670 - DNA, 414 bp, Glycine max
  Clone ID: LIB3167-030-P1-K1-G1
acccacgcgtccgcccacgcgtccgcccacgcgtccgcccattcgtccgtgagatgtggggagatggatgggaaacaagatccttcaccttcattgatgagtgtgttgaaggtgtactgagattgactaaatcagacttccgggagccagtgaatattggaagtgatgaaatggtcagtatgaatgagatggcagagattgttcttagctttgaggataagaatataccaatataccatattcctggcccagaaggtgttcggggccgtaattcagacaatacattaatcaaagagaaacttggctgggctccaactatgaagttgaaggatgggctgagaattacatacttttggatcaaagagcagcttgagaaagagaaggcagaaggtgttgatttatcaggctatggat

SEQ ID NO: 52671 - DNA, 439 bp, Glycine max
  Clone ID: LIB3167-030-P1-K1-G10
gtttaggaaaccccgcggcgacccacgcgtccggtgagtgacacagagacacagctttgtttaagaaagatgagcgacgacgaaaggaaggggcaaatagcggagctgagcaaaagcctcaaagaaggagagaggctcgtgggcccaacgagacggcccgacggaaccctccgcaagcccattcgaatccgcgccggctacacccctcaagacgaagtcgccatttaccaacccaaaggagcactcttgaaaaaggagatgggctccgctgggcctcccgggtacgaaccagacgctgattccaagcccaagaccaagtccgttaagaggaacgagagaaagaaggaaaagcgcattcaggctgcgcttgaaaaggaaaagaatgtgagtgaagttgaagatagtggaaagcaggaatctctggaggcattgacctcac

SEQ ID NO: 52672 - DNA, 104 bp, Glycine max
  unsure at all n locations
  Clone ID: LIB3167-030-P1-K1-G11
gacccacgcgnccgggttataaagggctcacgggttttttttttaagcgctngaatattttctaacaggccgcttattttaaaaaaattatcttattaatggac

SEQ ID NO: 52673 - DNA, 409 bp, Glycine max
  Clone ID: LIB3167-030-P1-K1-G12
gacaaaagaagaagtatcactcatataatactctgtatcatttcatttcgataatcaggcatagctactgaagaaaatggcaaccatctctgctgctatcacaaccccatcgatctcccgcgcaactcttgtgcaaaagcgggtctcatctcccgttcttggtttgccagcaatgggtaaggtgggaagagtgagttgctccatggaggaaaaaccttattctgtgaaggaaagcagctctagcatgttggggatgggggcatctctgatggcagctgccagcgctgcagccatgtcaggcccagccatggccttggtagatgagagactgagcactgaaggaaccggacttccctttggcctcagcaacaatcttcttggttggatccttttcggcgtctttggtctt

SEQ ID NO: 52674 - DNA, 366 bp, Glycine max
  unsure at all n locations
  Clone ID: LIB3167-030-P1-K1-G2
cccacgcgtccgaaataattggtcctctttttttgtggaactcaattctattaggtgggtggaaagagaaaaaaaaacatggttgaatcgtagtataggtggatatatttttagaagagtattgatgtaaattcctttgctagaaattttaacaagtgttcttcttttgcncaaaaacaaagaaagttagacaatagaagaaatgtttcattataaaggtagaggcaaaagttatagtcaaaagcacctgaaagagtcataacatagggattatagtaaaaataacaaaaggggggcccgttttaaaggatcacaatttacttccgcgggcttgcaaagtaaaagtttttttttggggccccctaa

SEQ ID NO: 52675 - DNA, 403 bp, Glycine max
  Clone ID: LIB3167-030-P1-K1-G3
ctacccactcctttctctgtctccatcgtttcttattgcacaagcactctctctttccgtgggcctttttcaggtttcaacgctccaactatccatggcaaaccgctggctcagacccgaggtgtatccactgttcgctgcggttggtgctgctgttgggatctgtggattccaactggttcgtaatatctgcatcaaccctgaagtcagggtgaacaaggagggaaggaaggcaggagttttggagaactttgctgagggagagaagtatgccgagcacttcctgaggaagtatgtgcgcaacagaactccggagattatgccctccatcaacagcttcttcgctgacacaagtcgcaactaagttgctttgaataaacaaaggttaatgtgagatattaat

SEQ ID NO: 52676 - DNA, 420 bp, Glycine max
  unsure at all n locations
  Clone ID: LIB3167-030-P1-K1-G4
ccacgcgtccgaaattcttcaatncctctattccttttttctttttctccttcacttgaacaattcctgcttgttttccccctcaattttttctcttcttcaattttagccctacacacaacataaactacaacaacaaacacctaaccattcactcactcacacatttctctctcagttttagcaacagtttgatgaagtcgtcacaaaaagcaacggttttggcttaattattagtattattgttgttattattattacaaggatggagataataacacccacagcaaccgccacaaacgcaaccgcaaaatcgccagaacccgacatagagacgatgacccggatccatcaaaacccgaacccgaatccaaagccggtgtctntctccaacggcgtcttgaagcgccaccatgtaaa

SEQ ID NO: 52677 - DNA, 405 bp, Glycine max
  Clone ID: LIB3167-030-P1-K1-G6
ggttgctcgaggacagagatgacaacattaggtacgaacagcagacttaacttttatttattgttaatcgttccctgttttattttacacagattcaagaaaggaaaaaaacaaacaagaggtttggtttggttttcgaggcaaatatggaaatgtcatcgtcctctctgggcatattgccggttcggtattgtttttttagttgctagatcttcttcacgttgccaatgcggtgggtagttaattagtagatatgggtttgagatttgagaacaattatgtgttactagagctagagtctccaatccttttattattattattattattattttcttttatctcattcccgttttcggtggttttgttttatgttatgttattgtaggaactcgatttatggag

SEQ ID NO: 52678 - DNA, 401 bp, Glycine max
  Clone ID: LIB3167-030-P1-K1-G7
cccctcaaagaaaagccaccttatcattttttctctgaaaattctctttagagagatggagagaggaagaaagaatggcagcttgcactgtctactcaacacaatctctgagcacaaattgctccatctcaaccccatcaaagacgcaactcagttttttccaccaaaagcaggtagttttctggaggaacagcaagaagggcagctgcagcagcagaagaagctatgtgataacatgtgcagcaggtgactcacagacagtggtgattggcctggctgcagactcagggtgtgggaagagcaccttcatgaggaggctgaccagtgtgtttggaggagcagcagagccaccaaagggtggcaaccctgactccaacactctcatcagtgacaccaccact

SEQ ID NO: 52679 - DNA, 388 bp, Glycine max
  Clone ID: LIB3167-030-P1-K1-G8
ctccaagttcctaccatagtgctttgtttttgagtgagagaaagagatcacatagcggggtggcttctactcaatgtttcttgcaccaccatgctcttaccacccctgccagatccccatcacaacgcatcatggttagcaccaagcctaaccagcttgtttgcaaggcacagaagcaagaggatattgatgtcagcccaatctctcgccggttagctctaaccgtgctcattggtgctgctgcttttggctccaaagtccaacctgctgatgcagcttatggggaagctgccaatgtgtttggaaagccaaagacagacacagatttcctgccatacaatggagatggattcaaactatcgattccctcaaagtggaacccaagcaa

SEQ ID NO: 52680 - DNA, 357 bp, Glycine max
  Clone ID: LIB3167-030-P1-K1-G9
gacccacgcgtccgcccacgcgtccgcccacgcgtcttttctttcatcatcgatatattgacattaaggaaagataaaaaaaaaaaaaaaaaaaaaaaaaaaaaaaaaaaaaaaaaaaaaaaaaaaaaaaaaaaaaaaaaaaaaaaaaaaaaaaaaaaaaaaaaaaaaaaaaaaaaaaaaaaaaaaaaaaaaaaaaaaaaaaaaaaaaaaaaaaaaggggggcccctttaaaaaaaacaaaattttatatccctggcttatacaacaaaatttttctttaattgtgccccaaaaattaaaatccttccaagttttttaaaaaacccttttaaaaaaaaactctaatttttcaatttt

SEQ ID NO: 52681 - DNA, 404 bp, Glycine max
  Clone ID: LIB3167-030-P1-K1-H1
aaaagatataagaatcgtgagctacagttaatgcacttgatggatcatccaaatgtgagctctctgaagcatcgtttcttttccactacaagtgcagatgaactttttcttaatttggtgatggaatatgttccagagtctatgtatcgagtctcaaagttctatagtaatactaatcagagcatgccacttatttatgtaaaactttacatgcaccagattttcagggggctggcttatatccacactgttcctggaggttgccacaaagatttgaagcctcaaaatatactggttgaccctcttacacaccaggttaagatatgtgattttggaagtgcaaaagtgctggtcaaaggtgaagctaatatatcacatatatgttcacttttctaccgggcacc

SEQ ID NO: 52682 - DNA, 351 bp, Glycine max
  Clone ID: LIB3167-030-P1-K1-H11
cccacgcgtccgcccacgcgtttttccacgcgtccgggaatgcttattccctacacctacttttttgtccctccaggttcaggttcttcagctggtggtactgttgccaaggatgctgttggaaatgatgtaattgcagagaattggctcaaggcacatggacctggtgaccgaacccttgcacaaggattgaagggagatcctacctatcttgttgtggagaaagacagaacccttgcaacatatgcaattaatgccgtgtgcactcaccttggatgtgtcgtgccatggaatcaagcagagaacaagttcatctgcccttgccatggattttaagtccatggcccaagg

SEQ ID NO: 52683 - DNA, 409 bp, Glycine max
  Clone ID: LIB3167-030-P1-K1-H12
cccacactctcttttctctacctacaaaaaaaaaaaatcatctaagttctaacgatgaatcaccaacaacaatctcctgtgactgcatatccagcaggggctcagagcaacctagcagctccaccaccacctgtaggttatcccactaaggatgatcttccttcccaacaaaatgttcctgtcaaaaccactaccaggggtggtggcttctggagcggatgttgtacggcactccgctatggttgctgttgcatacactgtctgcaatgttgtttctcctcttgaacatcccttcactttatggatttgagcttgttctctctgtcttttgttattttctttaccagattaattttgtatcttgttgatctttttgtactttgtggaagggaactaataacatgcatgg

SEQ ID NO: 52684 - DNA, 336 bp, Glycine max
  Clone ID: LIB3167-030-P1-K1-H2
aaaaaaaaaaaaaatcaaaaaaacaaattttttttttttactgagctaaaaaatatacgggccggttatgtcatcatttataaaaccactacaaatgcaaatcatacttatacttaatttgctcttcgaatatgtcccatagactatgtatcctgtctcaaagttctatactaattctaatcagagcattccacttatttatcctaaactttacatgcaccatatttccattagcctggtttatatacacactgttcctgcaggcagacacaaatattctaagcctcaaaatatactaattgaccctcttacacaccagtttcagatattttattt

SEQ ID NO: 52685 - DNA, 442 bp, Glycine max
  unsure at all n locations
  Clone ID: LIB3167-030-P1-K1-H3
gacccacgccgtccgggaatgggcacggtgacanaagttacaccgagcttccatcagctaggttgaatttttatacaaacatgtgatggaaaaggggaggcaaagaagcgataccttnncatcactattagttaccttctnngcaagtaatgcanntctgatgctaggagcaacatgnnattggtgaaattgagaatagatcatcattcctcttagctgtgaaagctgatgtagaaacacaaggtgattttgtcatgtccttggcagctgaagttcgagcagcctccttctcagatattaatgacttggtggcctttgtgaactggctagatgaggaactttccttcttggttgacgaacgagccgtcctcaagcactttgactggcctgaaggaaaagcagatgcactaagggaggcagcttttgaatatcaggatttgat

SEQ ID NO: 52686 - DNA, 409 bp, Glycine max
  Clone ID: LIB3167-030-P1-K1-H4
caaagacagtcatggcgtcgtttcttcattggtttctggatccgaagaagaactggttcgccgctcagcacatgaaatccctctccagacggcttcgcaaatacgggctccgatatgacgatttgtacgatccttactacgatctagatgtgaaggaggcgctgaatcggcttccgaaagaggtggtggacgctcgccacgcgcgtcttaaacgcgccatcgatctttccatgaagcacgagtacctccctgacaatcttcaggcaatgcaaacaccattcaggggctaccttcaggatatgctgactcttgtgaagagggagagagccgaacgtgaagcattgggaggtttgcccctatatcaacgatccattccttgagtgcattaattattttgattgaagtggga

SEQ ID NO: 52687 - DNA, 328 bp, Glycine max
  Clone ID: LIB3167-030-P1-K1-H5
attcattaaccattcgtagactccatttttctttacagctgccgatggcatggatggtgagggtggtcttaacatacataatggcggttactatgaacgcctcacgtagattaagagccaactggtgcggcacctgatgtcatacatgtcggaaaaacctttaatcgcatggcgcaaagctgcggatgacactggtacaaatggggcatttcaccatatggacattggtggtacgccccaagctacataccctatgcaatacatgagggatgcattgattaatcagagagacaaatatatgaatatgactcctacaaaccatagatat

SEQ ID NO: 52688 - DNA, 419 bp, Glycine max
  Clone ID: LIB3167-030-P1-K1-H6
aggcgtacggagtaaacaaacaactactagggcaagtatgattttagagaaaaagatatggcttccacttgtgcagtttcaatggttatgccggtaacttatgccagccagaagagagtggtgcctagctctgatgcattcttcaagccactcacactacggtcctccaaggtagtggcggcatcaaattccaatggaaggtttcaggtgaggacctccatgaaggagaaagttgtaacagggctcacagcagctgcattgacagcttcaatgatggttcctgatgtggctgaggctgccgtctcaccttctctcaagaacttcttgctcagcatcgcggcaggtggagttgttgttgttgccattattggtgctgtgatcggtgtttccaatttcgatcccgtcaagcgaagctgatg

SEQ ID NO: 52689 - DNA, 392 bp, Glycine max
  Clone ID: LIB3167-030-P1-K1-H7
cccacgcgtccggatagacatcacaactactgtcctgggcttcaaaatatccatgccaatcatgcttgccccaacagccatgcagaaaatggctcatcctgagggagaatatgcaacagcaagagctgcatctgctgctggaacaatcatgactttgtcttcatgggctacttcaagtgttgaagaggtagcttcaacaggacctggcattcgctttttccagctatatgtgtacaaggacaggaatgtggttgctcagcttgtgagaagagctgaaagggctggattcaaagccattgcccttactgttgataccccaagactaggacgcagagaagctgatatcaagaacagattcacactgccaccatttttgacattgaagaactttg

SEQ ID NO: 52690 - DNA, 400 bp, Glycine max
  Clone ID: LIB3167-030-P1-K1-H8
cccacgcgtccgcgagataactataaacagtgtgatgaaaatgaaggtccttgttttcttcgttgctacaattttggtagcatggcaatgccatgcgtacgatatgttccctctccgaatgaacactggctatggtgcccgtactccggaggtgaaatgcgcaagttggaggcttgctgtggaagcacacaacatctttggctttgagaccattcctgaagagtgcgttgaagcaacaaaggaatacatccatggcgaacaatatagatcagactccaaaacagttaaccaacaagcttacttttatgccagagacctcgaagtccatcccaaggacacatttgtgttcagtatagatggcaccgtactctctaatattccatactacaaaaaacatgga

SEQ ID NO: 52691 - DNA, 366 bp, Glycine max
  Clone ID: LIB3167-030-P1-K1-H9
cccacgcgtccgagtgctcacactttcaatcgctgacaccttttgaaccacggctagggtttctctcaacattctttcaccttacactctctacgtacaaagaatacaccttcaatacaatccatcagcatccatatatttacaattatcacactaaattcgacacacttgactcagattgctacattgctaatcaaagggctatgaacacgcggactcaacttgcaatttacaagcactggactgccctagacgcgaccccttttaatattgcactgcaccaccactagccattgagcaatcgcaggttctagactttccatcgtgaatgggtatcctcgatagagtacgaagatgaactgcccg

SEQ ID NO: 52692 - DNA, 354 bp, Glycine max
  Clone ID: LIB3167-031-P1-K1-E6
aaagcattgaattcaaaaacttaagttcattccttgtgttttgctttcttcctcaaaaccaaacatgtcgaacacatgcggcaactgcgactgcgctgacaagactagctgcaccaagggaaacagctatggtgttattgtagagactgagaagagttacatcgagactgttgtcatggatgttccagcagctgagcatgatgggaagtgcaagtgtggcactaactgcacttgcacggactgcacctgtggccattaaggaatatgtatgaaaatgtaattgccatgtgtttggcaatacaaatatccaaataatgtaatcttcgtatgaataaatgtgtgtgctgttatcct

SEQ ID NO: 52693 - DNA, 402 bp, Glycine max
  Clone ID: LIB3167-032-P1-K1-A10
aaagtccaaattttctagttccaccaaaccaaaccaaaccaaaatggcagcagcctcagcctgatccatgatatcaacaccagccttatctccaaccatccaaaagcaccatcatttgaagccatccaacgtgtgcttccaaggtcttagacccctcgcaaggttcaccaaagcctcatcaaccaaagtgagcaccaccaccaaaagggttattccaaagggtggtgttagagctgaactcaactcagcccttgtgataagcctcagcactggcctctccctcttcttgggaaggtttgtgttcttcaacttccaaagggagaacgtggcaaagcaagtgcctgagcagaacggcctcacacactttgaggctggtgatacacgtgccaaggagtatgtcag

SEQ ID NO: 52694 - DNA, 271 bp, Glycine max
  unsure at all n locations
  Clone ID: LIB3167-032-P1-K1-A11
accgtccgtttcccgttcgacccacgctccgaaatattgaggatagtatatggaattggtgatgaacatgttcgtggtgcttcggcctggggagcatgtggtcacatagctcaatcttacttaaagntaaacacatttattttggacttccatagattatatcacttgtctttaatccattgctaatttccttgttgtaattaaataatgttgatgggattagaccttgaaaaaacccttgataacatgcatataatatataatgcgagat

SEQ ID NO: 52695 - DNA, 351 bp, Glycine max
  Clone ID: LIB3167-032-P1-K1-A12
cccacgcgtccgaaagtagttgtggcagcacgtaactgaagagatggaggacaaccaaagacgactctaacaaaatttggtcaaagggtagaaatttttttatacaacctggtccgatacaaagattttctatgtcaatggacgaatcagatgtttctaagctagagagcctaataacgccaaaaattaaaagagtttctttcagagattctgtcaaactctgtacttatgaagatatgccagagacaactactgtagatgcaattgatgacaaaagaacatagtctgagcagatcatccagctgacttcaagaggtgtgaactgtatcaacagtgattgcattggaaaaa

SEQ ID NO: 52696 - DNA, 348 bp, Glycine max
  Clone ID: LIB3167-032-P1-K1-A3
ctccgatctgaggccatggcggggtctgggagttccatgctatattcctttcttctcttcacagtcattgtctcacttcaagaaatgtaccgagggaaactagcatcatcagaattatacactatacttggagggttcgttagctctctcctatttcttgtgctcctaactttcattggaaattttcaggaaacaattggtgcaagaactggttggggagctgtcattgttgcagaagctgttgctctgattgctgcaagcactgtccaccgagtttgcatcactacatgtttcctgttctcggctgcattgctgtatgaggttaacaagatctctgggtcagcgctt

SEQ ID NO: 52697 - DNA, 449 bp, Glycine max
  Clone ID: LIB3167-032-P1-K1-A4
gcttcttctacactcgctcccactctcagcctcttcaccaaatcccactgctatctccccaacaccaaagaccggttttcatgtcccagaataaagttattctactccaagcaccgctccttctccgtctcagcttctgcttctgcttccacttcaaattcgcttcaggctctcatattcgactgcgacggcgtgatcctcgagtctgagcacctgcatcgccaagcctacaacgatgcctttgttcacttcaacgttcgctgcccctcttcttcttctccgggcccactcaactgggacgttcaattctacgacgaactccagaacctcattggtggaggcaaacccaaaatgcgatggtactttaaggaacacgggtggcctaagtccacgttgttcgagacgccctccactaatgatgaggatcgggcccaagtgattgacactct

SEQ ID NO: 52698 - DNA, 414 bp, Glycine max
  Clone ID: LIB3167-032-P1-K1-A5
ctttgagaagcgaaatcgccactcttgatccctttcgaccgtcatcggatctttctgcgggcaccgtgtatcgcacttcgttgccgtcatcggcgccggaattctgaatcttaatgaagttgtgaagtgatgatgagtggaagagctatccaataacatgacatgaattccaaaattttctatacttgaaaattaagccagcttaaacaatacaaggatgttttcgttgttttatggactatggaagtacttgttcagcaagatggagcttcatgtactcattctgggtattgacaaggctggcaaaacgactttgctggagaagatgaagtcggtgtactcaaatatagaaggcattcctcctgatcgaattattccaacagggggattggaacatggtcggattgaagtggc

SEQ ID NO: 52699 - DNA, 346 bp, Glycine max
  Clone ID: LIB3167-032-P1-K1-A6
cccacgcgtccgcttcttttcttttttttccctacgttgtgaccaggttgttcactttagctgcgaaagtgtttgtttggctcagtttgttgaattcgctggcagctacagctatgatcatcaacagcaccccttttcctctatgatcgattcgattccgtagagtgagaaatcagatcagaataatcatcgatgggtaatttgttcgtgaagaagcccaaagtaacagacgtcgataaagcaattctcgctctcaagacccagagacgcaaactcgcccaatatcaacagaagctagatgcttgtattgaagcagaaaagcaagctgcacgagacttgattcgtg

SEQ ID NO: 52700 - DNA, 354 bp, Glycine max
  Clone ID: LIB3167-032-P1-K1-A7
ctccaacatgccaaacgacagcgttctgagtcttttcttcttcgttaccctcttcacatgcggtctctctgctaattcccacgatgaccatattttcctaccgagtcaactccatgacgatgactcagtgagttgcactgctaccgacccaaaccttaactacaagccggtgatcggaatcctgacccaccccggcgacggtgcctctggccggctcagcaacgccaccggggtttcttacatcgccgcctcctacgttaaattcgtggagtccggtggtgctagagttattccccttatctacaatgagtcacctgagaaccttaacaagaagctcgatttggtcaatggagt

SEQ ID NO: 52701 - DNA, 340 bp, Glycine max
  Clone ID: LIB3167-032-P1-K1-A9
gagtatgggaggctcatggtcatgggagctcacatgtgccctcttgctactcttcgccgccgtagtcaccgccactgaccacattgtgggtgcgaatcgtggctggaaccctggctttaactacactctttgggccaacaaccacactttctatgttggcgatcttatctcattcaggtaccaaaagaaccaatacaatgtgtttgaggtgaaccaaactgggtatgacaactgcactacagaaggggcagtggggaattggagcagtgggaaggatttcataccccttaacaaggccaagagatattacttcatttgtggcaatggccaatgcttcagt

SEQ ID NO: 52702 - DNA, 103 bp, Glycine max
  Clone ID: LIB3167-032-P1-K1-B1
ttgaactatggagacgggcggagaatattggactaagaatagctgacagctggttgatggagactgagaactggcgtctgagaaacttgagtggagagctgag

SEQ ID NO: 52703 - DNA, 202 bp, Glycine max
  Clone ID: LIB3167-032-P1-K1-B10
ccgccggttcccgtcgacccacctcccacctccccacctcgaaaagaaatgccttcactattctttgagcgaaagagaatactggtgtatttttactctgtttactatacctaccttaccacctgtgggtcatcgtggtatttttaaaggtcccattttggtgcgtcaggaacggggatgattgcgacggaaccctgcctta

SEQ ID NO: 52704 - DNA, 88 bp, Glycine max
  Clone ID: LIB3167-032-P1-K1-B11
gtgtttagatcgcgagcggcgttgaggatccagcactcctgcgtgacgtatcttttatggacctaaacaattatgccgcgtttacact

SEQ ID NO: 52705 - DNA, 266 bp, Glycine max
  Clone ID: LIB3167-032-P1-K1-B12
gtggttaggccacttgtctagaaggagaccctttgacatttgacacaaagcttagagggagggctgatcccaccatgcatgaaatgctacaaacttacaggtattttatggtagcaataaagctgtagaggccaacaatgaagagtgtgcagctaaggaatagacccttggacctaggcgaccctagatgaaggggtaacagacatgtcacacactcaagaatgggctcacaggatctttacatgtccacattctggtactaataa

SEQ ID NO: 52706 - DNA, 131 bp, Glycine max
  Clone ID: LIB3167-032-P1-K1-B2
agccacaaggtacttgtgctagagtggctattggacaggtccttctttctgtccgctgcaagggcagcatcagccatcatgctcaggaggctcttcgccgtgccaagttcaagttccctggtcgtcaaaag

SEQ ID NO: 52707 - DNA, 277 bp, Glycine max
  Clone ID: LIB3167-032-P1-K1-B3
cccacgcgtccgctcttccagtcaaattgttgcatcgtagttcaccacacaagttgttcagtgatggcgcgaccactcgtaggagtttaatctatgcatcaaaaagaaactcttttgggcaccattatgatggaaatttggtggatgagaacatgatccttcttagaatgcgaattcgtgagattgagatggtggaaatgaagggtaaagctacttcggattggagcgtatgggagaagaagtatttagctgagaattattgttcgtgtgtatgtgt

SEQ ID NO: 52708 - DNA, 438 bp, Glycine max
  Clone ID: LIB3167-032-P1-K1-B4
catattccttaactttttcctgcttaattacctccacgaccatgggggaagattgaaccaatgttttagattagacgctatagtttgggcaagaagaagtgttttacttaattttttccaagctattgctgatcttgggaagaaaatgaatcaggaaatgaatggggttgaggcagagagggtgaaagtgaatgtgcatgacaaaatagattatgtgtttaaggtggtggtgataggggactcagctgtgggtaagactcagatactgtcaaaggtttgcaaaggattgaattctgctttgactcaaaatctaccattggagttgagttccagacaagaactgtcacaattaatggcaaagtcatcaaagcccagatctgggatactgctggccaagaaaggtacagggcagtgacatgtgcattctacagaggggca

SEQ ID NO: 52709 - DNA, 498 bp, Glycine max
  Clone ID: LIB3167-032-P1-K1-B5
ggtcgccacgcgtgcgcccacgcgtccgcccacgcgtccggctttcttcatttcttttttgtcactgcccgtgtgtgcggcgccagtgccaccgtcaccacccaagcctccgcctcaattttccggccatgtacctcgaaatcgaggtttttgaccggctcttccggtaaacttaaccgggaagtgactatgcggccaatggggtgccctccttctgcctctttcaaggttgaagccaagaagggagagtggctacctggcttggcctccccaacttacctcaatggcactcttcctggtgacaatggatttgacccttctggggctagctgaggacccagagaacttgaggtggtacgttcaagccgagcttgtgaatggacgttgggccatgttgggtgttgcaagaatgttgcttcctgaggttttcaccaagtttggaatcatcaatgcccctcaatggtatgatgcttggaaatcagagtactttgaattttc

SEQ ID NO: 52710 - DNA, 348 bp, Glycine max
  unsure at all n locations
  Clone ID: LIB3167-032-P1-K1-B6
cccactctttctcccacgcgttttggaagtggtnctttaaatcacatgacaagggcaacaatgcgcgtgtctncaagccttccaatcaacctaaaccttcttccgataaaccccagtccgagaaaacggtggctggaggtcaggaaagttcatggaggaagataactagcaaatatttatattctaacaagcaaaatgggaaagacaagaaagaaatgcatgagctccctgctaaaaaaaagaatatgaatgacagtgaggaaataccggagccaaagaaaattcatgaagattatggagatgactctgtgttgnccactaataaaaagaaattagctgacaccactc

SEQ ID NO: 52711 - DNA, 207 bp, Glycine max
  Clone ID: LIB3167-032-P1-K1-B7
catatacctaatacggactttcacatatcttcccatcattacttctctcacgctcgaggtggcggctaatgcttatgctgcattaccttcttcattttactggaagtccaagatttctaccacaccaatgccgaaagccatcactgatttgctacaacctgattggaaggaagtgaaagacacctctgtggatgcagggaaaggtgg

SEQ ID NO: 52712 - DNA, 297 bp, Glycine max
  Clone ID: LIB3167-032-P1-K1-B9
tctggccacctcaacttttattgtctttgctcctagcctcttttgggctcttaccaaggcacactcgccgataccgtttttaccttcaacaagttcaaccatcaaccaaacattatgctcaaaaagagctgttttatcttgggtgtacaactaccaaagtggcgcacggcgtgccacctgggatcttggcgtgccttacgctgccaatcagattgggcagcgaaaccggcaggtagccagtgggctacatcttaattaacatttgaccaacaataaactagtgacggctgccttttc

SEQ ID NO: 52713 - DNA, 355 bp, Glycine max
  Clone ID: LIB3167-032-P1-K1-C1
gcaaagcatccttcgcttcaatctctctctctctctttgcgctttctgcaaaccgaacatttcatctccgaaggtcgaaggagaaatggggctgacattcacgaagcttttcagccggcttttcgcgaagaaggaaatgcgaattctgatggttggtcttgatgctgctggtaagaccactatcctctacaagctcaagctcggagagatcgttactacaattcctaccattgggttcaatgttgagactgtggaatacaagaacattagcttcactgtttgggatgttggtggccaggacaatattcgtcccttgtggaggcactacttccagaacactcagggtcttattttt

SEQ ID NO: 52714 - DNA, 201 bp, Glycine max
  Clone ID: LIB3167-032-P1-K1-C10
cacctctttgcaagccctatacatctaaccctaaccacacccattgatgagttcatggctgcctaggtgcattttggctgaggttgatggttgtggggtgccccatgccatgcagcttactgcggcgggcgtgtgctgcattgattttccttagttggtgtcctcttttttcttacttattttgcctttttcttttttttt

SEQ ID NO: 52715 - DNA, 405 bp, Glycine max
  Clone ID: LIB3167-032-P1-K1-C11
ggcacaattgaagaggccattaaagagaagaagttgtacatgttagactatcatgatctatgggtaccatatgtaagcaaagtgagagagattgaaggaaccacactatatggatcacgaacactattctttctcactaaacaaggaacattgaagccactagctattgagctcactaggccacctattgatggcaagccacaatggaagcaagtcttcactcctgcttcttattcaatttctcattcaaccaatctttggcttttgaggcttgccaaagctcatgttcttgcccatgatgctggtgttcatgaacttataaatcattggttaagaactcattgcttcatggaaccctttgtcgttgcatcaatttggcaactaaatgttattcattcattttac

SEQ ID NO: 52716 - DNA, 250 bp, Glycine max
  Clone ID: LIB3167-032-P1-K1-C12
ctccacgcgtccgcccacgcgtccgcccacgcgtccgctttcgcaaacctaattactgctatgacgagacgacgcagatttagttcggattgttcgattgcgatggctaggaagatgcttatcgatggtgaagctgaattggctcaaggtggtggagaagaagtgtcgaattttgacttctacttgtttattattggggctggaattgatggcttatagtctcttttgatttcattcaattttttaattt

SEQ ID NO: 52717 - DNA, 347 bp, Glycine max
  Clone ID: LIB3167-032-P1-K1-C2
caactatctatcatccttcttctttctgaatccgtaccacttgcaacacacatggctacagggaccaaggctttcatattcaaaccccccatctctcatcacccaaagcagcttctttattcccaccgatcttctctacgctttctcaccaaatttaaaaccccctccggagcgaattctcggcggctggctccgaaagccacggcggctcccgctgccaagaagacagaaaagccgcacgcgagagtccagcgagtccacaccgtggcggagctcgagtcggcgctcgaatctcccaaagacaggcttgctgtggtggaatacgctgccagcgacagcgaggagag

SEQ ID NO: 52718 - DNA, 294 bp, Glycine max
  unsure at all n locations
  Clone ID: LIB3167-032-P1-K1-C3
ttccattctctaacgctatcatcatcaacacagtttcacattcataacttctatggttggggttaggaacacctttgataattgtactancattattacattgcttctttagcaagttgaaaaaagctgtcgtgatcatcttcattgatttctttgtttttcatttgattattcatctttgtattttaatatctttattcatatttttataaaatatattttttatatatttattatttctaatttttatactttttaatttaatatttttattttattttttatttattttta

SEQ ID NO: 52719 - DNA, 457 bp, Glycine max
  Clone ID: LIB3167-032-P1-K1-C4
ctggatcctatcatcttgtggctttgatgtctagagcattgtaacatgattacatagggttggcagaggatccgtcaatggacggaagctctgacaaactgtcttctgaggatggtaaaacctcatcactgaacttgaaggagacagagctgaggcttggcctccctggttgcgagtctccagagagaaaatcaggttctgcactctgtctttttggcaaagagttgcagaacaataacaatgtttgctcagttgtaagccctttgaaggctggggccaagaggggcttctctgatgtcactgagggatctcaaggagctgctttgttctctccaagaggggccaatgttgggaaacctattattggtttagacactcaaactaacacccaacaacaggcttacaccaccatcaaagagggtggtgcagttctttcctaatctactaaacccggttc

SEQ ID NO: 52720 - DNA, 228 bp, Glycine max
  Clone ID: LIB3167-032-P1-K1-C5
gccaatttaaagtgggaaaaaataaaattcaaagtgcatattgtcagggatcattaacaagagtggggggacccttcatgtgggagggcacatgacggacccgcatcttatggttgagcaccatgctggataatacttaaggaagcaccattgtgaacacagttctgagtacataggtgagcctcatagtgatcacaaagctcaagagtaccatggcttgcacaagcc

SEQ ID NO: 52721 - DNA, 54 bp, Glycine max
  Clone ID: LIB3167-032-P1-K1-C6
gtcaattcatatccacatacaacatactttccagttttcctttgatgcatgcca

SEQ ID NO: 52722 - DNA, 432 bp, Glycine max
  Clone ID: LIB3167-032-P1-K1-C7
aagtaaagtaaattaagaagatcattaatggcttctcttgcaaccttagctgctgttcaaccagctgcgctcaatggccttgctggaagttccctctctggaactaagctctctttcaagccctctcgccacactgtcaaatccaagaacttcaggagtggtgccgtggtagcaaagtatggtgacaagagtgtgtactttgatttggaggatctgggcaacactacggggcagtgggacttgtatggctcagatgcaccttcaccctacaaccctcttcagagcaagttcttcgagacatttgctgctccattcacaaagaggggattgttactcaagtttctgatattgggaggtggttccacccttgcatacttcagtgcaacagcctcaggtgacattctaccaatcaagaagggaccacaacttcca

SEQ ID NO: 52723 - DNA, 406 bp, Glycine max
  unsure at all n locations
  Clone ID: LIB3167-032-P1-K1-C8
ccttgagaaaattggcaccccagtggcccttaatctacgcgggaaggcagcggtagcccaagcagcattggcttaccagctctaccaaaggaaattttctggtccaaggtgggaagctctagttaaaaagggggccaagaagcaaaggctcctctgggcctcaaccagtgtaaagaatcctgcctattctgacaccttatatgttgctcctcttattggacccgacactgtatcaacaatgccagaccaagcccttcaagcatttatcgatcatggtaccgtatccaggacaatagactcaaatgcatctgaagctgaaggaatatacaatgctctccagaaattgngtattgactggagctttgttggttcccagcttgaacttgaaggagtggactcgtttaag

SEQ ID NO: 52724 - DNA, 367 bp, Glycine max
  unsure at all n locations
  Clone ID: LIB3167-032-P1-K1-D1
cccacgcgtccgagaggttttgacttgtgaagaaagccttggaagagatcctgggcatgtcactgctgacagaagtttcccaatggggtttgtacagctcaatgcaatgcgtctagctgacatcttctctgatgattcaaactttcgatcttacatgatactttgttttactaaagtcctgacagcaataatttcgctctcccatggagattttttatcctgttggtgttcatctaatctctcagagacggaggaggatgcaagtattgaatatgatatanttgctgcagttggatggattttggataatacttcaccggatgtaagaaatgctacaaatttggaatttaacctaatccctacagca

SEQ ID NO: 52725 - DNA, 416 bp, Glycine max
  Clone ID: LIB3167-032-P1-K1-D10
cagatctgctccttcctcaccccacaggctgattctagactgtaactttcagaagtcagttgaagagcatgggtcgtggagttagcagtggtggtggtcaaagttccttgggttatctttttggcagtggagaggcccctgccgcaaaaccggcatcaaacaatgccccagcccaacctgtagtgcaggctgtaaataatgcgcctccttcaaaagcatctcctcctactaaaacaatagaccctaacatggctgctggtataaacagtcattctactgatggccagaacaccggcaacttcatcacggaccgaccctcaaccaaggtccatgctgcccctggtggtggttcttttttgaggtatctctttggtggacctggagaggggaaatgataccttgcttgcaaagctttt

SEQ ID NO: 52726 - DNA, 118 bp, Glycine max
  Clone ID: LIB3167-032-P1-K1-D11
gcgccgccggattcccgtccccacgcgtcgttttctttcttgtctaggccctgagatcacattgaacagtgaaggctggggcttcagcagagggtacgaactacattttagaggaagg

SEQ ID NO: 52727 - DNA, 291 bp, Glycine max
  Clone ID: LIB3167-032-P1-K1-D12
gcgccggcctatcgtcgacccactcattcaatatgagatcccttaagaaggcaattttttgacacttccaggtcgttatgcctgaacaacagtgcatgatttgtttatgttggtgggcatgactggggcatgttttgatgcgttgtccatgccatgcaggattttttattaaaaaaaaaaaaaggcggcgttgaggatcagtactcctgctcactatgcttttatggtacctaataatatggctctttacacttgctggaaccctcttccacttatgctgataatcctttt

SEQ ID NO: 52728 - DNA, 359 bp, Glycine max
  Clone ID: LIB3167-032-P1-K1-D2
agagctctttggacaacaccctctaaaccaatctatcaagtcctgattaatctgctgagcatggagctttgttggctcacaaccatccatggttcttgaagaagcttggagagaaaggggtgcgagaggagagggtgctcactcctcacactccctcacttaatacagttcgcttcggcttagctatggcttctgtgatcaacaagggatgtgttctaacattgtttcttgagtggcggtagcagatacacattctccgacggtggagaggcttgactacagactggcaaaccggcaagtcacaaaaaaggcactggactccattgacgtctctatggctatgtatcgctcatgtagtt

SEQ ID NO: 52729 - DNA, 417 bp, Glycine max
  Clone ID: LIB3167-032-P1-K1-D3
ctagaaacagtgtgatgaaaatgaaggtccttgttttcttcgttgctacaattttggtagcatggcaatgccatgcgtacgatatgttccctctccgaatgaacactggctatggtgcccgtactccggaggtgaaatgcgcaagttggaggcttgctgtggaagcacacaacatctttggctttgagaccattcctgaagagtgcgttgaagcaacaaaggaatacatccatggcgaacaatatagatcagactccaaaacatgtaaccaacaagcttacttttatgccagagacctcgaagtccatcccaaggacacatttgtgttcagtatatattgcaccgtactctctaatattccatacttcaaataacatggatatggggtggagaaatttaactcgaccttgaatgatg

SEQ ID NO: 52730 - DNA, 353 bp, Glycine max
  Clone ID: LIB3167-032-P1-K1-D4
ggaattcggtcgaccacgcgtcgtggatcctatattgggttgatgttagagcatgaacatgattacataggtggcgagatcgcaaggacggagctctgacaacgttttgggatggaaaacctatactgactgaagagacagagctgggctggctcctggttgcagtctcagagagaaaatcaggtctgcactctgtctttttggaaaaagttgcagaacatacatgttgctcagtgtagcccttgaagctgggccaagaggggctttttgagtactgaggatctaaggagctgcttgttctctcaagaggggcaatgttggaaacctattatggttagacactaaactacacc

SEQ ID NO: 52731 - DNA, 436 bp, Glycine max
  Clone ID: LIB3167-032-P1-K1-D5
aatcctcgtaaacattaatcgcttttgcaattacaaagctgggacagaacatccaagtactggcaagtgcctttgtgaataagcaagagctatacaaagcggaaggagtgcaaaatcttggagacatagcagtgctgtgtcataagctcaatttcagaacggctgcattttattgccatgaagttcggggaacaacagctttcacggttccattggttgctggcgatggaaccaaaactcaggcacttgctgtttgtcactcatatacttgtggcatgcaataggacattcttcatcaaactatgggagtcgatccgggaactaacactgtttgcaatttgcttggaagcaaggccatcttatggtgaccaaatctagctatggacactgcctatcagacttacatcgtcgttaaggaattcatgctgagaatgag

SEQ ID NO: 52732 - DNA, 424 bp, Glycine max
  Clone ID: LIB3167-032-P1-K1-D6
gtcagacttaccccttgctaccaacactgagcttaaccgagcttcgcaaagatgaatcgggaaaagtggatgaagatggccggttcggttagaactggaagaaagggtactgtgagaagaaagaagaaggctgtccacatgacaacaaccacagatgacataaggcttcagagcaccctgaagagaataggggtgaatgccatccctgctattgaagaggtcaatatctttaaggatgacgtagttatccaggttctaaatcccaaaggtcaagcattcattgctgctaatacttgggttgtcagtggttcaccgcaaacaaagaaattgcaggatatacttcctagcattatccaccaattaggaccagttaacttggaaaacctgaagaagctagccgagcaattccagaagcatgctcctt

SEQ ID NO: 52733 - DNA, 285 bp, Glycine max
  Clone ID: LIB3167-032-P1-K1-D7
aaaaaaaaaaaaaaaaaaaaaaaaaaatttaaattttaaaaaaaaaaaaaaaaaaaagacggtcgtttctatatttacacatgacatacctactccctctttcatctaaaatacctctcttatatttactcccatacctaatttactcaccttcttttctcaaaaatcctactttttaaacaattcattacctaacttaatatctctcctacactttctctcttattaacttatcgttataatttattatcccttaccaacacttcttctttacaattttttatt

SEQ ID NO: 52734 - DNA, 261 bp, Glycine max
  Clone ID: LIB3167-032-P1-K1-D8
gccgaattcccgtgcccacgcgtcgtatcctaattgggcttgatgtctatgcattgcaacatgactacatagggtgcggaatcccaatggacggagcttacaactgctctgggtggaaaacctatataacttgagaacagctgagttgcctctggtgggttcagaggaaatagttgacttgttggaaggtgaaacatactgtgtagtgagcccttgaggtgggcaaaggtcttgtgcatagggactagggctgttgttttc

SEQ ID NO: 52735 - DNA, 391 bp, Glycine max
  Clone ID: LIB3167-032-P1-K1-D9
ctggatcctatcatcttgtggctttgatgtctagagcattggaacatgattacatagggttggcagagaatccgtcaatggacggaagctctgacaaactgtcttctgaggatggtaaaacctcatcactgaacttgaaggagacagagctgaggcttggcctccctggttgcgagtctccagagagaaaatcaggttctgcactctgtctttttggcaaagagttgcagaacaataacaatgtttgctcagttgtaagccctttgaaggctggggccaagaggggcttctttgatgtcactgagggatctcaaggagctgctttgttctctccaagaggggccaatgttgggaaacctattattggtttagacactcaaacttacaccca

SEQ ID NO: 52736 - DNA, 219 bp, Glycine max
  unsure at all n locations
  Clone ID: LIB3167-032-P1-K1-E10
ccggnccgaattccctttcgacccactcttctctctccactcgttctctccactcgtccgaaattaaatataaaaaaaaaaaaaaaaaaaaagaaaaaagaaattttattttaaataatttttaaaaatactaatttttactttcatttatattacttcttaatttaatttttttttttatacattttatttaatttactttttatataattttaatat

SEQ ID NO: 52737 - DNA, 86 bp, Glycine max
  Clone ID: LIB3167-032-P1-K1-E11
cccacgcgtcgcacctcgaagcgtctacttatgagagaatgcgcacgtacttcgatgctagcgggcctggaaggttaccgagatac

SEQ ID NO: 52738 - DNA, 301 bp, Glycine max
  Clone ID: LIB3167-032-P1-K1-E12
cccacgcggacaaccacgcatccgttattacactttaaatgtgaaaacgaaagcaggatacggagtcccacagacgtggctgaccatgagacaagtggctctgactcagattccagcaacacgcggctggaggatgcactgtacgacaccataaacttcagcgacttcaacaccgttactaagatcgaaccactccacatcgagaggaagtaccatagatcggcgtttaccatgattaagaggtggtgccagaaccggtctagaattggaccatgtccatgctattacgagactactctat

SEQ ID NO: 52739 - DNA, 335 bp, Glycine max
  unsure at all n locations
  Clone ID: LIB3167-032-P1-K1-E2
cccacgcgtccggttctagatcgcgagtggccgccctttttttttttttttgttaaagcagaggtaaggattacaatcaaccagaatccaacattaactaatggaacagatatccacttccccccaatgtattgattgggaaggaaaaggggggagatggcacaatggagatttgaggaggaagaaaattcaaaagtttggtgccaaggaaagaaatttgaggccggcccaagctaacaacagaatacatgcaacttacgcacaggatttagcaagtaaaaatatgggagaagatacatgttnctctataactgtatatcattgtcatggtggat

SEQ ID NO: 52740 - DNA, 480 bp, Glycine max
  Clone ID: LIB3167-032-P1-K1-E3
ccaaaccaacacctttcaaaatgcaaacatccttaacctttgctgcccccaacgttgtgcctttggcacaaacaaagagtttctcccatgttgccatcttccctaccaatttgtaagccccacgctcttcacctcgttactctccgatcagggttgcaatcgtggagcctgacacttcaactgtggactacaactctgcgttctcagtgtttccagcggaagcatgcgaaactgttggaggggaagcctgcatggcagaaatgtaccctgaagtgaagctacagccagatgctaagacaccacgagttgttacagagaacgttgagagagagtatcttgaatacgatgatcctaaaacggtatttagaggagaggcttgtgatgatcttggaggaactttttgtgagaccgagtatcaaaagggtgtctactagagaaaaaagaaaaccctttttattgccatggctactgcgttttaat

SEQ ID NO: 52741 - DNA, 429 bp, Glycine max
  Clone ID: LIB3167-032-P1-K1-E4
ctggatcctatcatcttgtggctttgatgtctagagcattgttaacatgattacatagggttggcagaggatccgtcaatggacggaagctctgacaaactgtcttctgaggatggtaaaacctcatcactgaacttgaaggagacagagctgaggcttggcctccctggttgcgagtctccagagagaaaatcaggttctgcactctgtctttttggcaaagagttgcagaacaataacaatgtttgctcagttgtaagccctttgaaggctggggccaagaggggcttctctgatgtcactgagggatctcaaggagctgctttgttctctccaagaggggccaatgttgggaaacctattattggtttagacactcaaactaacacccaacaacaggcttacaccaccattaaagaggttggtgca

SEQ ID NO: 52742 - DNA, 506 bp, Glycine max
  Clone ID: LIB3167-032-P1-K1-E5
atcaatcctatgacatggccacttccatctctagtacgttgtaacacgactacatagccgttggtttggtgctacttaccaaggcgcacttgtccaataccgtcttttggagcttgaacaagctcatcactagtcaaccaagcatcatgcctcaaaatgatgctagcttgtcatgcgcttgcatggtgcaactcaccaaatgtggtatcaacggcttgcccaccgttggatctcattgtcgtgccctgttcactgccccaatccagatttgctacagccaaaccgggctggtatccagctactctacattctttaaatgcaacattttcgcacccaacaaatgaaactcagctgacaggcttgccttcttcttggcacccgtcgggtctcagaccccatgcgtccatggatatcttggtctgttcaacagtcccttaaaggacaagtctctccaaaccgtggcgagtgagttcggtactttctccgacaaaaaatgggatcccgca

SEQ ID NO: 52743 - DNA, 433 bp, Glycine max
  Clone ID: LIB3167-032-P1-K1-E6
attggatttcctgtatgggcaattaccatagttctttttcctgcttcaaagcagtgaaccaggattgagaggaggtagtacataaaaatgtcagcacattactggaaattctcacttgacacccaaagtagggaattgcccaggatcttcaattgatggagccggaatgttagcagttgcatagccaccatatccttcttttgaccacgttcacgaccatgactgcgttcatgcccacccgggttatagtaactttcaccctctgtggacttcagaaactcattgattttgacagactctttggatttatctttccttctaagagtctttcttcgcttgttcctatcagatcccagcttaataaagatgtattcaatgttttttttgttttacagtttcttgtatgattcaaaaacttttgtatttacctttt

SEQ ID NO: 52744 - DNA, 434 bp, Glycine max
  unsure at all n locations
  Clone ID: LIB3167-032-P1-K1-E7
ctggatcctatcatcttgtggctttgatgtctagagcattggaacatgattacatagggttggcagagaatccgtcaatggacggaagctctgacaaactgtcttctgaggatggtaaaacctcatcactgaacttgaaggagacagagctgaggcttggcctccctggttgcgagtctccagagagaaaatcaggttctgcactctgtctttttggcaaagagttgcagaacaataacaatgtttgctcagttgtaagccctttgaaggctggggccaagaggggcttctctgatgtcactgagggatctcaaggagctgctttgttctctccaagaggggccaatgttgggaaacctattattggttntgacaactaaactaacacccaacaacaggcttacaccaccatcaaagaggttggtgcagttctt

SEQ ID NO: 52745 - DNA, 245 bp, Glycine max
  Clone ID: LIB3167-032-P1-K1-E8
ctggatcctatcatctcgcggcttcgatgtctagttcattggaacatgattacatagggttggcagagaatccgtcaatggacggaagctctgacaaactgtcttctgaggatggtcaaacctcatcactgaacttgaaggagacagacctgggtcttggccttcctagtcgcgagtctccagagagaatatcatgttctgcactttctctttttgtcgaagagttgcataacaataccagtgtt

SEQ ID NO: 52746 - DNA, 433 bp, Glycine max
  Clone ID: LIB3167-032-P1-K1-E9
aggaacagctagcagagaaacaaagttacaagtaaagtaaattaagaagatcattaatggctgctcttgcaaccttagctgctgttcaaccagctgcgctcaatggccttgctggaagttccctctctggaactaagctctctttcaagccctctcgccacactgtcaaatccaagaacttcaggagtggtgccgtggtagcaaagtatggtgacaagagtgtgtactttgatttggaggatctgggcaacactacggggcagtgggacttgtatggctcagatgcaccttcaccctacaacccctcttcagagcaagttcttcgagacatttgctgctccattcacaaagaggggattggtactcaagtttctgatattgggaggtggttccacccttgcatacttcagtgcaacagcctcaggtggcattc

SEQ ID NO: 52747 - DNA, 398 bp, Glycine max
  unsure at all n locations
  Clone ID: LIB3167-032-P1-K1-F1
ccacgcgtccgcccacgcgtccgattcgcccaagaaggttgtctgttcttgttccatattgggaagtgagttggatgcgtatccttatacatcaatcactcatgaactgtagaaatcatctgcctgaacaaacccctatttcaacattcccgtgtaaagtacgtatacgagcaattatatacttatagaaaagtttgtgttaatggtgacttccgaagatgctgtcattcttttattacaaggtctacagggttgatgacacatngtaaccattgattgctactgttgtgcatcaaagttgtcgtttgcatttgcatttgcaatgacgtgcgtgatatctcttttgagtgtgtcactttctcattcagnttatgatgccattgacatggataattcac

SEQ ID NO: 52748 - DNA, 314 bp, Glycine max
  Clone ID: LIB3167-032-P1-K1-F10
gccacgcgtccgcttacttataaccatgtcaatgtcaatcttcgtacagcaccacaaaatagcggcatcatttttgggtgtggtgctgtacaatctgggacattgagttcatcttctgaagaagcccttgatggaataattggttttggacaatcaaattcttctgtgctttcacagcttgctgcatctggaaaggtgaaaaaaatattttcacactgccttgacaatattcgtggtggtggaatatttgccataggggaagtggttggaccaaaagttagtacaacttcattgtttcctttaatggcacacta

SEQ ID NO: 52749 - DNA, 231 bp, Glycine max
  Clone ID: LIB3167-032-P1-K1-F11
attccggtcgacccactcgccacctcgtttttttttttcatttcaccctgctttcttgtgtcgggggcaaccacaacatatgttaacaggacaacctcaaaacataacatctacgccaaacaaaattgacctctaactatccctcttcttttgcttcttttatttaaatctcatatggcacgggttctacgcacagatgttacccaccatggtgttcacgctggctttccg

SEQ ID NO: 52750 - DNA, 394 bp, Glycine max
  Clone ID: LIB3167-032-P1-K1-F12
agataggaaaaatctctggtcgcaaaacgttatctgctgttctgtgcaaggcataggattgacgatacaactggcggaagttggcagaagcaagtgaagagtctacaggttctgagctattacagggtctattcagactgtggctagaagatgatgctggatgatcagcatgtgatgaatgttataaaagggcacagcatgatcctccggagatattcatgggaaatagtttgcttcaggaccatgagaacagtgtccggacagctgcaagtctgagatgctatcatcattttaaagaatcttacagagcaccctcacatgatagaaacgcaaatcattatatagggaatgtaagtatttgaagagacagtaatagcagaccgaaaaagatgag

SEQ ID NO: 52751 - DNA, 479 bp, Glycine max
  Clone ID: LIB3167-032-P1-K1-F2
atcttattctatagtctatacatatatattaatctatttcaatttttttattaccaataaggatcatggctgagcatacacaatcctagtccttaaaatgcttggagctgtagcagcttccacatcgctatacttttcaccatccacaaactccaccagaattgttgttcttaaaagaatctcaaattcaacacttccattcagcaatgaccactctttctcactcttatcagccacccctatgcatttctcttcacacaagagcagtagaaggcaaccccatttccttgcacaagctgcttcatcttctggaaatgcagttggcactttcttggaaaatgaacaatgcagactggggaataaactttaagggcagtgctgcatttgtgaaagataatatatacccttgaaatgtaagatgatgtttctgtgtagaatatgttttttttccttcttttttccttttttaattttaaact

SEQ ID NO: 52752 - DNA, 458 bp, Glycine max
  Clone ID: LIB3167-032-P1-K1-F3
gtaaaccctaactggatactgaatctgaagtaagagggttgtcgacgggtcgagatcgagcctcggaagagggaatcgcagcgaagtccactatgccgaagcaaattcatgagattaaagacttcctcctcactgcaaggaggaaggatgcacgctctgtgaaaatcaagcggagcaaggatgtagtgaagttcaaggtccgttgctccaagtacctgtacactctgtgtgtgtttgattctgagaaggctgataaagtgaagcaatcacttcctccaggtttaagcgtgcaggatgtgtgattcttactgctgttgatgaagatcaagttttgctttggattttggggattcatatttagtgaaatggttcacagatttttcttatctgttgttattttttgggatcatattattattaagtttaagacataaccaactttgtttgtggattatgtg

SEQ ID NO: 52753 - DNA, 173 bp, Glycine max
  Clone ID: LIB3167-032-P1-K1-F4
ctcacgactccgtgtttatcaatcatacatcactattgtttcatcacaggctaaaacgatggagaccctggacgtttatgaagggcactgcgactaccagatcggctacaaaatctggtaagtcaagtgcgtccagcacggtatagatcacaactgggtagtccagaaaatac

SEQ ID NO: 52754 - DNA, 348 bp, Glycine max
  Clone ID: LIB3167-032-P1-K1-F5
gtatcatagttgttgagttcagtcttgccccttttcttgacaaatagtatcgttttcatttgttctgggtctgtctttgatggacaacgcagctgctgaacttcaaagtgaggcagcagatcctgctcttcttctccgccatcagaatcctccagaagaccaagcctctcctctctgcaaataccagcaaggtcagtggaaaatgcattatcatcttttaacaagacagatggtcctacattgatatcaagtccaggttccagtagagggctacccccaaggccaaattcagccagtgccatcaagtccaccatgagaactttactctctgagaggagctttagggct

SEQ ID NO: 52755 - DNA, 484 bp, Glycine max
  unsure at all n locations
  Clone ID: LIB3167-032-P1-K1-F6
gcaaccttccgcactagtaagggtttatagaatgaattcgaagtaaatgggttgttgcacctcgttggatatggagggcgtgcttttgtncccatcctcaacaacttcatttcgcttggtacaaagtaaggatgtgaaaggcaacgttcgagaggaggaggctgaagtggccgatcctcaaaaaaagggcaagatgctgagcaatctatacttaaccgggccagtagtccccaaactggtggaagcatgaagtcaatgaaggaggacaagaaagagaaggaaaaggacatatctggcccggcagagaaagaagggcaagaaagctcaaagttaaagactgctggtgcttaaggagaaataacagcaggatttttattaaaggaaagggcaaaaactaatggttggagcatgcgatggtttgtgctaaatgaaaagacaggaaagcttgggttccaccaattacaagagggaaaaccattttcgc

SEQ ID NO: 52756 - DNA, 274 bp, Glycine max
  Clone ID: LIB3167-032-P1-K1-F8
aagccactttgaatttttttcttgcgtggcttcactgatcagtccatggctggcttttacttgctgcttttgatcctaaatcaagagtatatgcaagggaagtgcatgctagagataggagagtcaagcaaaaatcaggccaaaatgccggactattttagtttctgtttgatagtctcaataagagtattgcaatgtagaagtgtcctaacttacagaagaatctgagatcaagtagttcttttatttttgcacattataagttacgttgcag

SEQ ID NO: 52757 - DNA, 429 bp, Glycine max
  Clone ID: LIB3167-032-P1-K1-F9
aaaaaaaaaaaaaaaaaaaaaaaaaaaattaaaatttaaaaaaaaaaaaaaaaaaaaaaaaaagaggataattaaaaaaaaaaaaaaaaaaaaaaaaaaaaaaaaaaaaaaaaaaaaaataaaaaaaaattgggcggccctttaaaatttccaaagtttatttaccctttaatgcaatataaaaccttttttttagtttaacctaaaataaatcaattgctccgtttttaaaaacttctatacttaaaaaaccttggtttaaccaaattaatttctctgaaaaaaatcccttttttacaatttgttaaaataataaaatggcccttacttattccctttatcaaaaattttctaatcctaattgcttattgttactccctctttaacgttatataatatcttatgtttttttttttttcattcttattt

SEQ ID NO: 52758 - DNA, 422 bp, Glycine max
  Clone ID: LIB3167-032-P1-K1-G1
tcatactctgtatcatttcatttcgataatcatccatagttactgaagaaaatggcaaccatgtgcggtgctatcacaaccccatcgatcacccgcgcatgtctagtgcaaaaacgttctcttgggttctcatctcccgttcttggtttgccagcaatgggtaaggtgggaagagtgagttgctccatggaggaaaagccttcttctgcgaaggaaagcagctcaagcatgttggggatgggggcatctttgatggcagcggccagcgccgcatccatgtcaggcccagccatggtcttggtggatgagagacttagcactgaaagaaccgggctaccattcggcctcagcatcaacctttatcgggtggatgctgttcagccgttttccgactcatctgggctctctattttgtctacact

SEQ ID NO: 52759 - DNA, 191 bp, Glycine max
  Clone ID: LIB3167-032-P1-K1-G10
gccgccgatcccgtcgcccacgcgtcggacgcgtgggtgctgcaaaggtggttgagatattcgcgatcctctggggagcataacgcctgtgaactgcaaatggagagaagttgtgaacgacgaataactgtgagacatttgggtgagatgatagactgccctactgacacagtattgacagctattttttg

SEQ ID NO: 52760 - DNA, 335 bp, Glycine max
  Clone ID: LIB3167-032-P1-K1-G11
ccggttcccgtcgacccagcgtcgttagctgtatcggagggaatatgaagttgtgttttgtgctgaagttggtagatggctccatgccgctccaaggtccttcaatgaaaactgcttggggctcttggggtaaagccagtttaggctgtgggagcacaccatcggccttaacattctgagagggtgaccacaagctcattaggcaacattaatagacttaacagtaccacgctttttatgctggaccaagtcatacacactatatatcgataatacacgactttaaatcatctagaaacatgttgggggaggattaagacctattgagatggtac

SEQ ID NO: 52761 - DNA, 304 bp, Glycine max
  Clone ID: LIB3167-032-P1-K1-G12
cccacgcgtccgtagaagttggcctagtttttaatccaagtaatttttctataataaaattgtgggctagtctggtctttatctttctggtgttcttttcagtatttcaagaattattgtcagggtttggaatatgagtttgtaagggttgtgatatcctagatgtgaaatagtttgaggaaaataataagagaaagaaattggatggattaaactagaagagaaattgttaatatttttatattaatttaaaaatgaaattaactttttactttattaatctttaaacttgtatattattatt

SEQ ID NO: 52762 - DNA, 332 bp, Glycine max
  Clone ID: LIB3167-032-P1-K1-G2
cccacgcgtccgcaagacatttgatcttagctactatagtcatgtgattaagagaaggggtctatttgagtcagatgctgcattgttgacaaactcagttacaaaggctcaaatcattgaattgcttgaagggtcagttgaaaatttctttgctgagtttgcaacctccatggagaaaatgggaagatataatgtaaagacagggacagaaggagagatcacgaagcatcgtgcatttgtaaatagctaagaatcttgtcttgttcatggatgaatcttgtatcatttattttttgagtttggttatttatgctatgccatgtttttttatt

SEQ ID NO: 52763 - DNA, 495 bp, Glycine max
  Clone ID: LIB3167-032-P1-K1-G3
cttcaattcattctagttctggattccgactagccgcgttgactcggttccgtttttcattctcgcggatctaatattaaggaatagcttaagggcacattacaatgaaggcattgattctggttgggggatttggaacaaggctgaggccactgacactcagtttccctaagcctcttgttgattttgctaacaagcctatgattttgcatcagatagaagcccttaaggccattggagtgactgaggtagtgctagccatcaattaccaaccagaggttatgttgaatttcttgaaggattttgaatcaaagctcggcatcaagatcacatgttctcaggaaactgaaccactgggaacagcaagtcccctggctcttgctagggataagctgatagatgattctggagaacccttttttgttctcaacagtgatgttatcagtgagtatccacttaaagaaatgattgaattccataaaagccatggaggag

SEQ ID NO: 52764 - DNA, 507 bp, Glycine max
  Clone ID: LIB3167-032-P1-K1-G4
cccacgcgtccgaattgaagttaaaagccttagccttccctacaactccaaacacaaagacatcatcatgcatggctgcctccgtctccactgtcggagctgtcaacagagctcttttgaacctgaatggttctggagctggagcttcagctcccagttcagccttctttgggaccagcttgaagaaggttattgcctcaagggtccccaacagcaaggtttccggtggaagcttcaagattgttgctgtagaagagaagaaagagattgaagagacccagcagaccgacaaggacagatggaagggtcttgcctatgatatctcagacgaccaacatgacatcacaagaggaaagggtttggttgactcccttttccaagctccacaggatgctggaactcactatgcagtcatgagctcctacgagtacctcagcactggacttcgccagtacttggacaacaaaatggatggattctacattgctccagcttttatggacaagc

SEQ ID NO: 52765 - DNA, 98 bp, Glycine max
  Clone ID: LIB3167-032-P1-K1-G5
cccacgcgtccggccaaaatcacaatatatgattagtaagtttactttgataacaattatggtaaaaatgacgacttagaatatagataaatatcaaa

SEQ ID NO: 52766 - DNA, 431 bp, Glycine max
  Clone ID: LIB3167-032-P1-K1-G6
gaccacgcgtccgttctttctttgaccttttaccggttgttgcgttgtcgcaaatggcattcttcagaagcgtggctgcagtttctcgacttcgctctcgcgtgggccaacaatctaatctggcgaattcagttagatggctccaaactccgagctccagtaacactgatctttattctgagttgaaggaactggttccagagtatcaggaacgtgttaagaagctgaagaaagatcatggaagtgttggattaggaaaaatcactgttgatatggtacttggtggaatgagaggaatgacagctttagtttggctaggctcaactgttgacccggatgagggaattcgccttaggtgcatgtctatttccgaatgcctgaaaaatgcttatcaaggtacattttccttgttgtggtgactttttccagta

SEQ ID NO: 52767 - DNA, 385 bp, Glycine max
  unsure at all n locations
  Clone ID: LIB3167-032-P1-K1-G7
agagaatggaggaagaggcagggatctaccgtctagcggaggacagcctccggcagatatggtgcaggctgccactgagggaaataatgatatgccgctcagtgtcaaaattcttcctgcagctgctctcaacaccttcgttcctccaggtcctctccagctcccatccacccctccagctcctggcccttcgcaaccgccaccacaccccttctcacacctctctccccctcttcgaccccgccaccaaatcatggctccactttcccctcgacttcctccccttccactcccctcttcccgtcgccttctccctcggccttctctacctctgggcccacaacaacttcaactncaactccaagtccctcatttgttgttaccc

SEQ ID NO: 52768 - DNA, 411 bp, Glycine max
  Clone ID: LIB3167-032-P1-K1-G8
agaaaaaaaagggggggaaatttcaatggcgtcaagggtttctctgaaggcgaagggtaagagttcaaagggatcgaaggccgcggaagatcgatctgcgagcgagtgcctgaaggagtggacgacatgggcaatgcgaaaagcgaaggtcatcactcactatggtttcatccctttggtcatcatcatcggtatgaactctgaccccaagcccccactttcccagcttctcagccccgtctgatctacctcttcatttcttccaccatcaacgcgacctcgtttttttcttttcttttgccccctttctacatttgtaagtttctttatggatcaattttcacttgcacatctcatgtggcatggtgtgttcaaagtcgattagcttgtctgtgtgtttggataggtttg

SEQ ID NO: 52769 - DNA, 375 bp, Glycine max
  Clone ID: LIB3167-032-P1-K1-G9
caagatgcttctgaggctggaacagctggtggagatggccaaggcagctctgcagctgctcataacagtggagatggtgaagaggcaaagtgacatttttttatgtgcttttcatgagatacatatgactgttgatagtaggtttttctttaaaggtaggactagtgtgatctgatgacctttaataggtcgaccaaaggacaaaagggcttctcttgtttgatagattaggtagattgtgttgttagaattttggcacaaagcaagtttgcatcaactgaaactgctggtgccttaacatactgttctcgttactggtaggtctaagcatgtggttattattgatcaccttattttaaatatattattttttta

SEQ ID NO: 52770 - DNA, 188 bp, Glycine max
  Clone ID: LIB3167-032-P1-K1-H10
ctaaacttacggattgagactgcactgggcaattaacagataggtccatatgaccatgatttagatatgactacgagacggcaacttcttggaaaaatctggacgcttgactacagacaatggagaggagctaataaactaatacttgtaatgccggtttgacctaattgagctaatttatatgattc

SEQ ID NO: 52771 - DNA, 469 bp, Glycine max
  Clone ID: LIB3167-032-P1-K1-H11
aaaaagactgagagcaattgcatcaacaacaaattgaaaggatgtcgatcttcgagtacaacggaagcgccgtggtggctatggtcggcaagaactgcttcgccattgccagcgaccgaaggctcggcgttcagctccaaaccatagccacggatttccaacgcatttccaagattcacgacaagctcttcatcgctctctctggcctcgccaccgatgctcaaacattgtatcagcgtcttgttttccggcacaaactgtatcagcttcgtgaagagagggatatgaaaccagagacctttgccagcttagtctctgctctgctttatgagaaaaggtttggtccatacctttgtcagcctgtaattgctggattaggggatgaagaccaaaccattcaatctgcacaatggattgtcttggggcaaaggagcttgcaaaagatttgttgtttctgggactgcatctg

SEQ ID NO: 52772 - DNA, 373 bp, Glycine max
  Clone ID: LIB3167-032-P1-K1-H12
cccacgcgtccgggaacaaataccatctctcgtccattgtctgcgtctcactcatcctctccgttctcttacattgttcatttctcaactctttctctcttttcttccaaaccctaatctggattagcctctcatcggatttcaattctcacggtcttcaccgaccgccagatctcttagcaccgctcttcttttcatcgattaaataacaaaaaattggcttaattttattctaacatcctaagcaaaaactaacgttttcacccgattttaacattcgagagaagagttagtttattttatgggatttttttattaaagttactggttctatttaaatcgcgtaaacggcgaggtcgggcgttagaattcg

SEQ ID NO: 52773 - DNA, 503 bp, Glycine max
  Clone ID: LIB3167-032-P1-K1-H3
aaatgctgctggaattaatgcaagttttgcagtccaccaggatgtggatggcagggctactgatgttgctttgggatggtctgttgcccttggttctccattcacttttgccactacattagagcaggaatacaggagtgatatctttggggagagaggcattttacttggtgctgttcatggggttgtggagtccctgtttaggagatacactgaaaatggaatgaacgaagatctggcctataagaatactgttgagtctataacaggaattatatctaaaaccatctcaactaagggcatgctagctgtatacaatgctttatctgaagatgagaaaagggaatttgagaaggcttatagtgcttctttgtatccttgcatggaaattctgtatgagtgctacgaggatgtagccagtggtagtgagattcgcagtgttgttttggctgggcgtcgcttttatgagaaagagggtctacctgcttttgccatgggtaaca

SEQ ID NO: 52774 - DNA, 410 bp, Glycine max
  Clone ID: LIB3167-032-P1-K1-H4
ccaaacgtacgaacacgcgcaaaccatgttttccttcgttcacaccatcatcttcatccttgtctgtgcaatgattatttcttgctcctgggcctcgtcattgggcctgagtagcaatgcgacgaccatctacgaggtcctgagcgagcacgggctgcccatgggcctgttcccgcagggcgtgcgggagttcgcggtgggcgaggatggtagcttctgggtgcgcctcgacgaggcctgcaacgccaagttcgagaacgagctgcattactagcgcaacgtctccggccacctcagctacggcatgatcgacgccctttccggcctcgaggcccaggatctcttcctctggttccaggtcatgagtatccgcgtcgacgtccccagcaccggccttatctactttgacg

SEQ ID NO: 52775 - DNA, 493 bp, Glycine max
  unsure at all n locations
  Clone ID: LIB3167-032-P1-K1-H5
ggtcgcccacgcgtccggagaaacaaagttacaagtaaagtaaattaagattatcattaatggcttctcttgcaaccttagctgctgttcaaccagctgcgctcaatggccttgctggaagttccctctctggaactaagctctctttcaagccctctcgccacactgtcaaatccaagaacttcacgagtggtgccgtggtagcaaagtatggtgacaagagtgtgtactttgatttggaggatctgggcaacactacggggcagtgggacttgtatggctcagatgcaccttcaccctacaaccctcttcaggtttgttgcttctttacatgtgcatcttcttcaatgagaatcaaacatgaaaaattatagataattcaatgatataatatatatactttgataacaaagatgcatgcataactntagattttaattttttgtatccatatcactataaagcaantttacactgaccaactgataagaaa

SEQ ID NO: 52776 - DNA, 404 bp, Glycine max
  Clone ID: LIB3167-032-P1-K1-H6
cgacccacgggctccggatcgagatactagaaacagtgtgatgaaaatgaaggtccttgttttcttcgttgctacaagtttggtagcatggcaatgccatgcgtacgatatgttccctctccgaatgaacactggctatggtgcccgtactccggaggtgaaatgcgcaagttggaggcttgctgtggaagcacacaacatctttggctttgagaccattcctgaagagtgcgttgaagcaacaaaggaatacatccatggcgaacaatatagatcagactccaaaacagttaaccaacaaagctacttttatgccagagacctcgaagtccatcccaaggacacattttgtgttcagtatagatggcaccgtactctctaatattccatactacaaaaaacat

SEQ ID NO: 52777 - DNA, 357 bp, Glycine max
  unsure at all n locations
  Clone ID: LIB3167-032-P1-K1-H7
gcgcctattagttatggccacccaacatgaattattgaacaggggaatgcaatcggcctcgggaacttgcacacacaaattgtccttgtatagttgattcaacattgagctttttttactttttctagattctggattgtttttagtgaaactagaacgcctgtgcaaaagcacaggaaacaacccagcagagtcccatttccgtgagtcattttttcgttaaaaaaaggttaaatacaaagagagagaaaactgaacattgcatagaatgaagacacttggaagtttagaatggtggctggacagttgttataatactattgatgaaatgtgatgtaagttgaaagtnatacaaaa

SEQ ID NO: 52778 - DNA, 294 bp, Glycine max
  Clone ID: LIB3167-032-P1-K1-H8
tccacgcgtccgctattattaatcacctcattggttgaaccattaagtgtcattaataggtggtgattcttgtaactgtgattctgaaaggccagtgttttttattttattggtctaaaaagtagctgaggtgtttatatggcacccgctggtcacttcgcatataatatacatatatggagagttatgtgttatcttgtgtgtggtggtgctgcttttcttcaatccaagttaataattatattcatgagagaaatcttttttgcgtgtaataaaaaaaaaaaaatattatat

SEQ ID NO: 52779 - DNA, 443 bp, Glycine max
  Clone ID: LIB3167-032-P1-K1-H9
cttggaagctttagagattgaagagggctctcctaggagtcaagggtctgaaaccccaagttgaagggccagcacttctgattcggagagtcagggatcttttgctggggcacctaataccaataaccaatggcggggtttctttaaactactcaagaaaggatcacaaatgcctttccaaccttttcacccacttaaaaatgttccaaaactgacaagaagaaaaagcaagaggatcagggaggacctcattccttctctgaattctccagctcttcatgcatcttttgacgctgagtttggctgcttcaaatcttcctggaaaaacttcactctcgccgagatccaagctgcaaccaatgactttagccatgaaaaattgattggggagggaggctatgctgagggttacttgggcaaattggaagatggaaaacttgttg

SEQ ID NO: 52780 - DNA, 350 bp, Glycine max
  Clone ID: LIB3167-033-P1-K1-A1
gtataatgctttactaccatgccctcacagccagttgggcctggtggagtcgattcatccacagatcctcgtgcatatgttatgagtcttacaggtggtacaagtcatgtcattcctgacagcagaaaaggtgcaagtaaaagactgagatcttaattcgagccctggtggtatggatacacaacggagagatgatacattgccttcaggattgacgcaaatgtctgtccccaattcacaagcctagatggatgaccacttgaacgaagttcatatggctggtgcattgaaaagaaaagaacctgattgtcgttgtgcgggagcccaaagattcttgtacaaacaaactt

SEQ ID NO: 52781 - DNA, 445 bp, Glycine max
  Clone ID: LIB3167-033-P1-K1-A10
cccacgcgtccgcttcccttctccaacatgccaaacgacagcgttctgagtcttttcttctgtggttaccctcttcacatgccttctctctgctaattcccacgatgaccatattttcctaccgagtcaactccatgacgatgactcagtgagttgcactgctaccgacccaaaccttaactacaagccggtgatcggaatcctgacccaccccggcgacggtgcctctggccggctcagcaacgccaccggggtttcttacatcgccgcctcctacgttaaattcgtggagtccggtggtgctagagttattccccttatctacaatgagtcacctgagaaccttaacaagaagctcgatttggtcaatggagtgctcttcactggtgggtgggctgtttcttggccatatttggatactcttggaaacatttttaagaaagct

SEQ ID NO: 52782 - DNA, 444 bp, Glycine max
  Clone ID: LIB3167-033-P1-K1-A11
cccacgcgtccgcccacgcgtccgcttgcatagagtctgcaaaaactttgtcaagatcatctagtgtgaattcaatgagaacattaacaaagactcctagtttcaagccttgtaaagcttgttcaagagaattcacatcagcagttctgtttgaagatgtgaatgcaccagagagagctacctgctcttcaactttgaaagactgcaagtttcccgagtacctcatgcttgaccctgggggaactgagtctgagggagtttcacttatgaaggtttgcccatatacatattgttctcttaatggccatggtcatggtcattctcctttgcctccattgaagagcttcatgtcagcaaggaggcatcttttggagactcagaagaatataaaggcggaagttgcgagccctcaaagatggaaggtgcccccctgtgatacaaaaa

SEQ ID NO: 52783 - DNA, 445 bp, Glycine max
  Clone ID: LIB3167-033-P1-K1-A12
ggggtttgaggaaactgagctaaggcttggactgtctggaaacgtaggaggcactggcactgaggaagtgctcatcaggaagagaggtttctctgagactgaaactgaaactgaggaggatgagtctgctaccactgtggatttgatgcttaatctttcttctaaggaagctgctgctgctgcagatccaactgataagcacaagactttgcctaaggagaagactcttctgcctgcagatcctgctaagcctccagccaaggcacaggtggtaggttggccacctgtgcggtccttccggaagaacatgttagctgtacaaaagagcgtcggagaagagaacgagaagaacagcagcagccctaatgcaagctttgtcaaagttagcatggatggagcaccttacctccgcaaagtggacttgaagatgtacaagagttaccga

SEQ ID NO: 52784 - DNA, 424 bp, Glycine max
  Clone ID: LIB3167-033-P1-K1-A3
caaaaccatggtgtcaccaatttcacacttagtaactttaatcctcttattatcagtttcattggcagcttcagcttcacttgaagaaaactttgtccaatgtctcagcttctattcagacaaagcagctccattttatgcatcaatttacactccacaaaatgcatcattcaacaagatccttgaatcctctgcacagaacctaaggtatttggtgccttcagcgccaaaacctgagcttatattcacacccttgactgattcccatgtccaagtggcagtgacttgctcaaagaagcttggtattcatctgagaattcggagtggtggccatgactatgaaggactctcatatgtttctgaaggtgagtcccctttcataattgttgatttgtccaagcttcgtgccatcgacgttgatata

SEQ ID NO: 52785 - DNA, 186 bp, Glycine max
  Clone ID: LIB3167-033-P1-K1-A4
gtccgcccacgcttccgcccacccttccgccaccccgtccgttggtttcaactttctgtaacttctgggttaggcaaaggtttcaaaccttcaatctatccttcttttgcttttgccaaaatgttatggtgaatagggaaggaaaaagatggaaaaaaatgtgactgtttcatgtactgatattgt

SEQ ID NO: 52786 - DNA, 453 bp, Glycine max
  unsure at all n locations
  Clone ID: LIB3167-033-P1-K1-A5
cccacgcgttcgtccacgcgtncgcgaggataaactgattcatttttctggtgttgctatgggggaaggcatgtacaatagttctgagaggggctagccaccatgttcttgatgaggctgaaaagtcattgcatgatgccttgtgcgtgctatctcagactgtcaatgacagtagagtgttgcttggaggtgggtggcctgagatggtgatggcaaaagaagttgatgcgttggctaagaaaactcctggaaagaagtctcttgctattgaagcattctcccgtgcactcttggctatttcaacgatcattgctgataatgctggtttggacagtgctgagttgatttcttaactccgggcagagcatcagaaggagggctgtacttctggaattgatgttatntctggctctgttggagacatggctgaacgcggaatatctgaagcattca

SEQ ID NO: 52787 - DNA, 395 bp, Glycine max
  Clone ID: LIB3167-033-P1-K1-A7
gggagtcgagggacgagccacgcgtccgataacacattaacctttctcattccccatctcctcaccttattcagccactgctaatttctaggggtccgaaaaggacagctggcacgaaagatcaagaagggcgcctgaggaagaaagggcggcggccctaagaagaagccggtttcaaggtccgtcaaggccggtctccaattccccgtcggaagaattggccgttatttgaagaaaggaaggtacgcccagcgtgtccgtaccgtggctcccgattactcgaccgcagttctcgagtacctagctactgaggtgcttgagttggctgggaatgctgcacgtgacaacaagaagaacaggattattccgagacatgtgctattggctgtgaggaa

SEQ ID NO: 52788 - DNA, 210 bp, Glycine max
  Clone ID: LIB3167-033-P1-K1-A8
gcgatgatgatatcagggcagaaggcggttcatttggcgttgaaggctttgggtaggaacagggcaattgatggaacgtgtggagttggaagggaagaaccccagcttattttggcttctgcggacactgaggaaattgttgatgcttaaattaagtttcaaattatataccttttcttttctgtttggcctctgcttatgattggaatt

SEQ ID NO: 52789 - DNA, 426 bp, Glycine max
  unsure at all n locations
  Clone ID: LIB3167-033-P1-K1-A9
cgcttcaantcttcttcatctacatctgtactagctataccgttccttctgccacaaatgaactggaaaggatggtgctgcccaagttctctccgttctcacggcttctcctttcttcccttgtgattctcttaataagctatccagttaaatgtgacgatgatgaggaagacaatctttatcagggtatcaacaagtatcgagcatcgttaaacttgaaagctctaacaaggaatgacaatgcagattgccttgctgaaaaaatagctgaccaattcaagaaacaaccctgcacaaataccacaggtgctaacactgtacctggcacagagcctcagttttctaactatccagaccttttatctaagtgtgacttggctatttccaacacaagggatggaaatgtaatgcctgcttgtgttcctg

SEQ ID NO: 52790 - DNA, 450 bp, Glycine max
  Clone ID: LIB3167-033-P1-K1-B1
gagaaataagggaaaaatggtgtcgctgaaactgcataagcgcctctccgcaagcgtgctcaagtgcggcagaggaaaggtttggcttgaccccaatgaagtcaacgaaatctccatggccaattctcggcaaaacatcaggaagttggttaaggatgggtttatcatcaggaagccaaccaagattcactcccgctcacgtgctcgtaggatgaaggaggcaaagaggaagggccgccactccggttatggtaaacgtaagggtacaagggaggcaaggctttccaccaagatactctggatgagaaggatgcgtgtgctcagacggttgcttcgtaagtacagggaatcaaagaaaattgacaagcacatgtaccatgatatgtacatgaaggtgaaaggtaatgttttcaagaacaagagagtcttgatggagagcattcacaagtc

SEQ ID NO: 52791 - DNA, 317 bp, Glycine max
  Clone ID: LIB3167-033-P1-K1-B10
cccacgcgtccggtgaagtttgtttattctgagaaggaagagagaatagaacgccatggatgagatattgaacaaggtggggtcttactggttctccaagaaggccagcaaggaatttaactctgtcggcgatgatatcaactcactgtcaaccagtattgaagggggaaccaaatggttggtcaacaagttaaaaggaaagattcaacacgcattcacagagttgctaaaggagtttgatctacccataggaatctattctatcgatgcgacatactacgaatttaacgaacagacaggaaagcttgacgtttaca

SEQ ID NO: 52792 - DNA, 404 bp, Glycine max
  Clone ID: LIB3167-033-P1-K1-B11
caacaacactaagtaaatgggatacaatacaatacatccttacaaatacaaacaatcaatgcggaattactagtaattcctaatattatcggttggttgcctgactagtgtgactactgcctagcactagcactaactaaatatcatacaaaaaccgaaccggttcaaaccgggtttgtattcctaaactgcaaatttttccctagactctaataaaatatcagcaggtgggaaccatttgagtctgggccaagccggtatccggttcagccacctctttcctcttccgaatctctaacactttacggtgactattggagtgaatatcgctgcagaaggtgggactacacgccggtctatactccgaaaataaccgacctgacttgtaccgaaccccgcacgcg

SEQ ID NO: 52793 - DNA, 439 bp, Glycine max
  unsure at all n locations
  Clone ID: LIB3167-033-P1-K1-B12
cccacgcgtccgcccacgcgtccggttcttttttatgtctagccagtagtanccaatgggttgtagctggttgggaatggcgtctaaaccgaaatcaaatggaaattccaaatgcaacaaaggattcgctgacagctatatgctgttgaatcctgaagacgctcatttcttcgatcttgttcatgtgctgtattcccgtaacttgggaaaccgaaaatttgtggacagcaatgctgagggatcttatgagggaagcttccgccaaagatggcttatattcgtctctgtggtgctccagaagcttctgttgctcatcgctaagccactttcgttctttggctcttgcgttgagttcttcattaacctccttgtccttaacggtggcttcatcatgatcgttattaacttcctcacagattttcaagaaaaggccacaacc

SEQ ID NO: 52794 - DNA, 453 bp, Glycine max
  Clone ID: LIB3167-033-P1-K1-B2
agcaaagacagtcatggcgtcgtttcttcaatggtttctggatccgaagaagaactggttcggcgctcagcacatgaaatccctctccagacggtttctcaaatacgggctccgatatgccgatttgtccgatccttactacgatctagatgtgaaggaggcgctgaatcggcttccgaaagaggtggtggacgctcgccacgcgcgtcttaaacgcgccatcgatctttccatgaagcacgagtacctccctgacaatcttcaggcaatgcaaacaccattcaggggctaccttcaggatatgctgactcttgtgaagagggagagagccgaacgtgaagcattgggaggtttgcccctatatcaacgatccattccttgagtgcattaattattttgattgaagtgggaggtttaaattgtatcgatgttgtgatagaatgtttcttttaa

SEQ ID NO: 52795 - DNA, 426 bp, Glycine max
  unsure at all n locations
  Clone ID: LIB3167-033-P1-K1-B3
gttcatacttgtttcttcaattncatttctttaattacttttcctcttggcattccaaatggccactgttgaggttgcacaacaaacaccaacaactgtgacagaaaatgaagcaaccgaggtaaccaagattgaggaaactaccccagaacaaccagctacccaggttactaccaccgaagaaccaaaggaagaaaccaccaaagaagcaaaagaggaagaagaagccccagttgagactaatgaggcaacagaagtgacagaggaagtgaagcctgaggtagaagagaacccagcacctgagagaacagaagaagaagaagtgaaagaggaaactaaagaaaccgaatcagcaccagtggaggaacagaagcaagaggagaacaaaccagctgaaaccgttgaggaaaccaaaacagaacaagt

SEQ ID NO: 52796 - DNA, 449 bp, Glycine max
  Clone ID: LIB3167-033-P1-K1-B4
gccgttatcttcttttttggtggttggggggttggttttttttctaacctgaaaatgtctggctgcggtggtaactgtggttgcggaagcgcctgcaagtgcggcaacggctgcggaggctgcaagatgtacccagacttgagctacaccgagtcaaccaccaccgagaccttggtcatgggagtggcaccagttaaggctcaattcgagagtgctgaaatgggtgttcccgctgagaacgatggctgcaaatgtggagctaactgcacctgcaacccctgcacttgcaagtgaggtgttggagagctaaagcttcaagcagagatggcccttagaaataatgataaaaactatatgtagtttcaaaacttcaaaattatgtagtatgtattatgttgcactctggttgtttgtgtctaaacaaacacccttagaataaagtggtcatt

SEQ ID NO: 52797 - DNA, 199 bp, Glycine max
  Clone ID: LIB3167-033-P1-K1-B5
cgccacgcgttccgccaagcgtcggatttctgaattagctaggtaggtaggtagagaatgggtatggaaagaaaaataaagctacacagaaactggaaagtagagtagtgaagaaatgaagcattgtttttcgtgtatatatttagggaaatgcaatgcatggtagagatggatggatggcaagtacaaatttccttgg

SEQ ID NO: 52798 - DNA, 352 bp, Glycine max
  Clone ID: LIB3167-033-P1-K1-B6
ggcttcaaaaagccaaagaggcaccgccacacttccaccaaagggatggatccaaagtttctgaggaaccaaaggtccgcgaggaagcataacaagaagagcggtgaaacagccacggaagaagagtaaagtgtcactctcaaatggggctattaggatttgatttgctattcaagtcccatatgttttgtgtcaaatctatatttagtagtatagtcattttgatgagttaatttaatccagagagaatgcagtacttaacttttatagcattcgttgctggtttttggttggtaaagacccttcaaattttatcgatggattattattcagctgttttttctttcagttt

SEQ ID NO: 52799 - DNA, 302 bp, Glycine max
  Clone ID: LIB3167-033-P1-K1-B7
ggaaccggcgacccacgcgtcgccacgcgtcggaaaatctacatttttgtagccaacacttatggagggtgtctggcagcgtatgtgatacacctactgggaaatcgaagaccacctatacgccgttatggcaagacgaggttggctaagaccaacttcctagtaaacctgggaaaaactgctaatatgactttaatggcggacatgtcaactggtgattggggccaaatacatggcatcaggggcctgggctgatggggagaagtcgggggtctggagaaaccggcggctgacttgcatta

SEQ ID NO: 52800 - DNA, 319 bp, Glycine max
  Clone ID: LIB3167-033-P1-K1-B9
gaaaagaaagagaaagagcgatgccaggatcattgtggcctcggtttgttatctttggttctggcatcgttcaatttggtttttatgatgaaggttgggtggctattctttctcatttgtatgcccgcaaggttgatattgatttgcgaggatatgctggttggaattcaaggcgtgctgtgcaggttctggataaagtttttcccaaggatgcccctatacaaccttcattggttattgtctactttggtggtaatgattcttctgctcccctctcatctggcctaggtcctcatgtgccttttcaagaattcattgt

SEQ ID NO: 52801 - DNA, 343 bp, Glycine max
  Clone ID: LIB3167-033-P1-K1-C1
gcgcctattagttatggccacccaacaggaattaatgaacaggggaatgcaatcggcctcgggaacttgcacacacaaatggtccttgtatagttgattcaacattgagctttttttactttttctagattctggattgtttttagtgaaactagaacgcctgtgcaaaagcacaggaaacaacccagcagagtcccatttccgtgagtcattttttcgttaaaaaaaggtaaaatacaaagagagagaaaactgaacattgcatagaatgaagacacttggaagtttagaatggtggctggacagttgttataatactattgatgaaatgtgatgtaggttg

SEQ ID NO: 52802 - DNA, 312 bp, Glycine max
  Clone ID: LIB3167-033-P1-K1-C10
ccggccgacccacgcgtccgttttcccttttcagctttcattggtgtggcctatctgatttctcaatgagaaaaactggatggctgcaaatcgcactattgcgctttaactttccctttttgcatgtttttaccttcttatactcttcttctacttcttcttctacttcttattttttaccctatgtttttctttctatttcaaacctttattttcttttttgtaaagtcttacattttctttttttttttctttcttttctcttttttctttttctatttctatttattttctatttattatttcattttt

SEQ ID NO: 52803 - DNA, 452 bp, Glycine max
  Clone ID: LIB3167-033-P1-K1-C3
gaaaaacttagctactaaggaaggatcaaagagaatggctcaagcaatggcatcaatggctggcttgcgtggttcctctcaggctgtgttggaaggtagccttcaagtgagtggctccacacgcttgaatgtggggagtggaagcagggtggcctcagtcacacgtgcagggttcacagttagagcacaacaacaacaagtgagtggtgaggtacaaagcagccgtagggcagtgctttcacttgttgctgctggtttggccactggctcttttgttcaagctgtgcttgctgatgccaaatctatcaaagttggaccacctcccccaccttctggtggattgcctggaacgttgaactcagatgaagcaagagaccttcagctattgaaagataggttctttcttcaaccattgtctcctactgaggctgcacaaagggcaaaggaatcag

SEQ ID NO: 52804 - DNA, 403 bp, Glycine max
  Clone ID: LIB3167-033-P1-K1-C4
gagcactgaccttttgttccgaaacctccatttccaaaggctcgccagagaaatggctcgggatttcaaaacagatcttcgtttccagagcagcgctgtttctgcgcttcaggaagccgcagaggcttatctcgttggactcttcgaggacaccaacctctgcgctattcacgccaagagagtcaccattatgcccaaggatattcaacttgctcgcagaatcagaggcgagagagcttaaaattaggtttcattgtgtgatctagaattaaaattaggttactgcttattgtaattcgtatttttcaatcgcctttttgttgtaatattcatcttatttcgaagtatatgctcatatggatctgaacattttaacttatgtcagaaaaaaagataattctct

SEQ ID NO: 52805 - DNA, 441 bp, Glycine max
  Clone ID: LIB3167-033-P1-K1-C7
gctcattactcagaggataagctagagaaacttgtatccaaggacagcctgcattatgagatgatttgcttccactactatgttcaataccatttacatttacaattatcagaagctgcagaatatgcaagaaagaagggagtgatactaaagggagatcttcctattggagttgacagaaacagtgtggatacctgggtttatccaaatttgtttcgaatgaacacttctactggggcacctccagattattttgataaaaatggccagaattggggtttccctacttataattgggaagaaatgtcaaaggacaactatggttggtggagagctcgattgacacagatggcaaaaatatttacagcttacaggattgatcacattttgggattctttcgaatttgggaaacttcggaacatgcttcgacaggttttgtt

SEQ ID NO: 52806 - DNA, 400 bp, Glycine max
  Clone ID: LIB3167-033-P1-K1-C8
ctctcctcttgttcatttcatcgcctctcatccatttccccttcgctcctctctctgggtctgctctcgcgcgcactacaatcaaagtcatgaaagcattttgttcatagaagaagaaattcctcttcctattagattaggggttttttcccattcaattcaatcatgcttccggcactgtctcaattcaaggttaaccatgtgggtgtggggttcaattcgtcccctaaccccatttccatgcttaccgcgctccgtcgcagacgctgtgttgtcctctttcgcctgcgatcctattccttcacagacttgagaatcaccgtccacgtcgaaactgactccaccgttcacttggagcgttgctttaacgcgcccgtcgctttccacctccctttcattt

SEQ ID NO: 52807 - DNA, 365 bp, Glycine max
  Clone ID: LIB3167-033-P1-K1-C9
agagcaccatttccagtccaaggcagactcctgtgtctccaaaacctaccctcaggaagccggggccattcgcaagaacggctacatcatcatcaaaggacgcccctgcaaggttgtggaagtttcgacttccaaaactggaaagcactgtcacgccaagtgccactttgttggaattgatattttcactgccaagaaacttgaggatattgtgccctcttctcacaactgtgatgttcctcatgtgaatcgtactgattaccagctcattgatattgctgaggatggatttctgagtctgcttactgaagatgggaacaccaatgttgacctctagcttcccactgttgagagtttgctcactt

SEQ ID NO: 52808 - DNA, 456 bp, Glycine max
  Clone ID: LIB3167-033-P1-K1-D1
ctattcttcaagattcaggtactgcgtttcggaagcagacacagatggctcgtacgaagcaaaccgctcgtaagtccacaggaggaaaggctcctaggaagcagcttgcaaccaaggctgcacgtaagtctgcaccaactactggtggtgtgaagaagccccaccgttatcgtcctggtaccgttgctcttcgtgaaattaggaaataccagaagagtaccgagcttttgatccggaagctccccttccagaggctggttcgtgaaattgctcaggacttcaagactgatctgcgtttccagagccacgccgtgcttgcattgcaagaagctgctgaggcataccttgttgggctctttgaggacactaacctgtgtgccattcacgccaagcgtgtaaccattatgcccaaggatattcagctggcaagaaggattcgtggtgagcgtgcttgag

SEQ ID NO: 52809 - DNA, 330 bp, Glycine max
  Clone ID: LIB3167-033-P1-K1-D11
cggacgcgtgggcggacgcgtgggttttcagcttttattggtgtggcctagctgtttggtgagtgagaaagccttcatctctgcaaagcgcacttttgcgctttggggttcccttgttgcttgttatcaccttctgttatgctacttctactgctgcagcaacaactcaagtttcatggaatgaagagctgccaaagacaaacctaaatgggcattatgtaaaatcaaaaatttgtattttttattttaacccatatttaagtaacatttttcaatttcaggttttaaacctttcccaaagcctttggcagtggtttaacctattccaaa

SEQ ID NO: 52810 - DNA, 464 bp, Glycine max
  unsure at all n locations
  Clone ID: LIB3167-033-P1-K1-D12
gaanaaccgggccggccgacgcgtacggntggctttgactcaaaagctgtgtgtgtttttattttaatgaacagtttatcaatggcgcttgtccacccaaatcttcttcccactttcaattccaacactcttacctttccttccatcaaactcaaaccctcactctcgcacgtgccttctccaacccccacacgcttcagtctctctgtttccgcgtcggaaaccaccgcttttgccgtcccttccactccccaacctgagaagcttggagttgtagttaatccaacttataaacctaaacttgtgttttaagttcatatttatttataaaaacattggtattgcgctttaccagattgttccgggccatggcaccatttctcttatcccatattacttttggccccataaagatgcctgtgaagagctcaaagtgtttcttgataacaagccttgtatctctt

SEQ ID NO: 52811 - DNA, 318 bp, Glycine max
  Clone ID: LIB3167-033-P1-K1-D2
cgtccgccaacccttccgttaaaatgttttggttaagtgcttgatttgaatttttcttcgttggtgtggcatgggcagtttcacgaggggctgagatcaattgaaggagtggttagttgtttgactgttgaagccaaattttgccacttgatgactgatgtagtggacaaaataaagatcgaagtaaaaggtgaaaataattaagaccctttcgaagattatgttttgcatatttgctaatgatgcactattgtatgggcaatgatcagtgaacactgaacacacattttttcttttgttttctctttatacattatt

SEQ ID NO: 52812 - DNA, 311 bp, Glycine max
  unsure at all n locations
  Clone ID: LIB3167-033-P1-K1-D3
cttttatctcgatggacacagaattccccggtgttttttttttaccacacctggacccaacaggagcgtgcaaccaccgtaacagcaatcgtaacctacacttctaccactaccgnctttttaagttcaacgtagacgctcttaaccttatccaggttggtcttacttttaccgacgcctccggcaacctttccgatctctccggataccgcttcatatgtgaatttaacaaccgtgacttcatcttttctcgtgtcgtctattttcttgactacatttattctttcttcactcgttaattgaattaattt

SEQ ID NO: 52813 - DNA, 410 bp, Glycine max
  Clone ID: LIB3167-033-P1-K1-D4
cggccggcaggctgaaaggagtgttcccaaaatcgcaatattttctattctatctgcaacagccaactttttgggtcgtcgatcacaaaaatggcggcaaaacttcaaatatttacgggattgccccccgcgccatttcaatcttcctcctccactctctgcgtactcaagaagcctctcactacctccttcttcggcactgcacgagtggaagttctgaaacttcgagtgatgaggattgcgaagcctgcgcgcggtggaggtgctctcggtgctcgcatgaacctctttgacaggttcgccagagttgtgaagtcgtacgcaaacgctgtcttaagctcgtttgaagatccggagaaaatattggagcaagctgtgctttgaatgaacgacgacttgaccaaaatgcg

SEQ ID NO: 52814 - DNA, 328 bp, Glycine max
  unsure at all n locations
  Clone ID: LIB3167-033-P1-K1-D6
ttgtgtntttttttatatatatatatatatatatttatttatatatatatatatatatataggtagatatatagacctccaggggtgccccaacacttccacactaaaatgcaccaattatcttaggcctgacattaaaaggggaaaattcaccttgcaaaaagaacaaaccataattcaacttcatgccctcttaggaaacaggtggtcttcaatagccacacacttgccaaagagaacggccaatgagatcaagaactactggaacacgcatattaagaaaaggttaactaaaatgggaattgaccctgtgacacacaagcctaaa

SEQ ID NO: 52815 - DNA, 314 bp, Glycine max
  unsure at all n locations
  Clone ID: LIB3167-033-P1-K1-D7
aaggaccaccttgcaaggctaaatactcttttgtgtcttatagtgaagtantaccgagaggggttggctagcattcctcaaacaaacaaaccctaaggctaaagactaactctttctgtggtcgttaccgaattcaaagtcgagctcctcgccctcgtaatcatctagcagggccatgttcctgtcgggcttgtcactgagagataagaacgatgagtcgtttccttgatcatcaccgttcaaatactaatcttctgcttcttccaattcaagctccaatttctctttgctttcccataactggttctgtttgt

SEQ ID NO: 52816 - DNA, 456 bp, Glycine max
  Clone ID: LIB3167-033-P1-K1-E1
ggaagtaggaatgtctctgaacgcgctggttcgtcttcctctctcgaattcacgcttccacgacgatgctgctccgatgattattaggcactctctgttttcgagccgaaagcaacagcagcagcagcagagttataaggttccacagcgtcatcaagtgttcgtggttgaagccaagggcaaaaagggaatgatgtctcgtcaatttcagcgcaatgctcctcctcctttacccaagattgaagacgatggcaatcccaaattcgtcatcttcattcgcatggccaatgtatacctttggtaccctcttagtatcgtatcaggcggcaccactgctaaaataatggttgcagctaaagataattttctcggcaagtatatctacaaagacactcttgatagaaatctcgctgctgttatctacagagatgagaaggaggtacagaaatctgcatt

SEQ ID NO: 52817 - DNA, 427 bp, Glycine max
  Clone ID: LIB3167-033-P1-K1-E10
ataaaatgtctttgagattggatcatgacacccccacttcaaataagctatcttccagctgtggaattcctctaacacaacatcactctcttcacctccaggctgatctcctttaatttctatcttcacccacaaaattaagataaacaaatggtgaagttctcaaaggagctagaagcccaactgataccagaatggaaagaggccttcgtcaactattggcagctcaagaagcagataaagaggatcaagctctcaagaattcccaagcaatcccaccaccacgctaaaccagactttggtctctccattttcgattccttaagcttctttgtcaaaaatattgctcaaaacttttcagcttcccgccatcatgacctcaacatcattcaggtgaggaagaaaaccacaaaggatgacgaagaag

SEQ ID NO: 52818 - DNA, 265 bp, Glycine max
  Clone ID: LIB3167-033-P1-K1-E11
aagataattcctcctatctttttccatcaggaacttatttatggggaggatgttcaaaatcataacagaaaaactttaagattaatccctgtaatgattataactattacttaactagtacattattaaaggaattcaacatattattacctaattaaaacttatcttaatttacataaacctaaaacaacaaactaaaacattttattaaaatagtgatggagttaatttattacaaaaatttacctctattattaactatttt

SEQ ID NO: 52819 - DNA, 452 bp, Glycine max
  Clone ID: LIB3167-033-P1-K1-E12
ggaaaggatatctatctatggcgatttgttttattgttaatctttgctttctctttcggagatgcgactctgcattagtctcttcttcaatacgcactttctcttcgtcagaagttccccctcgtcacttgcagaatgttggattcattggtcttggaaatatggggtcccgaatggcaaataatctgatcaaagctggattcagactcacagttcatgacctaaactctgatgttctcgagatgttctctcagatgggagttcccacaaagaaaacaccttatgaagtttcaaaagcaagtgatgttgtaatcacaatgctacctaattctgcccatgtgattgatgtttacactggaccaaatggtttgcttcatggtggaaaacttctaaggccatggttgttgttagattcatccactattgatccaaaaacatcaagaaacctttct

SEQ ID NO: 52820 - DNA, 441 bp, Glycine max
  unsure at all n locations
  Clone ID: LIB3167-033-P1-K1-E2
cccacgcgtccgcccacgcgtccgccaacgcgtctttcaactcgtccgaaaggccaaacctgggctgcgggtttggaggaaagaaagggaccattaaatcgaataaaaagcaccccatatccaagataggagctttctttccctgtttattctgagtcacgcataccgtgattctcctattagatcggcctttttccatttccatttcattcgggggtcgcaaatttctgggactaatcaattgacaatgctgcattagtgggattggtactgccgggttctttagctgatgaaagaggattgagcggtggtgcttgtggcttgngtgttgcttacctgttctatacgctaattcagaagctctgtcaaatttagtgcctgacttactgctttattgagggattcatttcatatatttaattatattgagttgggaaaatc

SEQ ID NO: 52821 - DNA, 455 bp, Glycine max
  Clone ID: LIB3167-033-P1-K1-E3
gcattccaaaggttgcctttttagcctctgcggttgtactcaagagtagctgcttcttgtccccatgcagcgttagcagtattgtcagaggataattctggcagcacgtcacagttggaagcaccaggacatgataataggacaaattcagaaagcatacattatcgagatggtggccctcatcaagaaacagcagtttcaaatcataatgaggataaggcaaaggtacatggttcatggggtatatatgagggtaggacaaccccactctctgctgagaaagttaaagatgcggctaaagctggcctttctgctgcagccatgaaagcaaaattatttttcgatcacgaagaacgagaaattcagaggttatgtgcttatatagttaatcatcaggtatcaactgtgtttttgacatcaattccaggttaataaactaaaatataaatttagtt

SEQ ID NO: 52822 - DNA, 442 bp, Glycine max
  unsure at all n locations
  Clone ID: LIB3167-033-P1-K1-E4
tttggaaccggtttggttccaagaaaccttgttttgggaagaaactcgttttgggtttgaaaaaccatggttgattccccaggaccttttgttttcaaagatggaaaaggcgatgaaaccatccaagtgtttgaccaagaagctttcatcgatgggtcaaccccgtttcagtccaagtttttgtccccggaggtggaatacaacctcaatcgaatgagcaagtggttagtaactgccctctttgcggtttcattctttggaggcatgacgcagaagccttatgtttacagcanggtctgttctgaatgctatgctttctgttttgctcaaacgtatactgaatcaggaacggccttcaaccctgaaatctgaccctgggatgccatcatcacatgcacaatccatattctttactgtcttctttggtattttgtcaggcgta

SEQ ID NO: 52823 - DNA, 444 bp, Glycine max
  Clone ID: LIB3167-033-P1-K1-E7
tgcatagactattgattaagaaagctattgtcattttatttgctagctccaacaatgggttcgagcagattatcattcattttagtacttgtgcttgtaaccttttcatccatgatcattgactcaagggttgcagaggcacgtaccctgccaaaatcagccttattgccttccaaagttgatatacctactgttgttcctcttccactggtggcaccactgccaaatttgcctgttactctccctccagtgcctgaactacctgcagtacctaaagtaccaatttctgaagtaatagttaataacgccaaaataatcccttgagtacctatgatctatccagtcactactacttattttgtcacttgcttaaataacttgttgttgccatcccaaggtggttcttgttctgttggggtttaatttctgtcattcaattacatg

SEQ ID NO: 52824 - DNA, 428 bp, Glycine max
  Clone ID: LIB3167-033-P1-K1-E8
ccaagttcttactttgaagagaaaataacttcttttgatgtctgtatcaggaggggggggggccattatgaggagaagaagccttctgatcaaggagcacatattaatctcaaagtcaagggccaggatggcaatgaggttttctttaggattaaaagaagcactcagctcaagaaactgatgaacgcatactgtgatcgtcaatctgtagattttaactcaattgctttcttgtttgatggaaggagactccgagcagaacagacccctgatgagctagagatggaggatggtgatgagatagatgcaatgctgcaccaaacctcgagtggacataagttttttcaaatgtatgatgaacattttcatcaaaaagcttgagaaaacgcatggtattcggtgcttgcttcaaggattctatttttata

SEQ ID NO: 52825 - DNA, 141 bp, Glycine max
  Clone ID: LIB3167-033-P1-K1-E9
ggggcggccacgcgtacgaaaataaccaacaagcttactaaaatgccttatactttgaagtccatcccaataacgggttggtgttcattatagaaggaacctcactctctaatattccaaactacaaaaaacatttatatg

SEQ ID NO: 52826 - DNA, 448 bp, Glycine max
  Clone ID: LIB3167-033-P1-K1-F1
aggaactagaaaatccatacaatcttcaccaccaaaaagaaaataatggcaatggccagtgcaacaactctagccacaatcactgttgtggcggctagccccagtgttggcagcagaaggagtgggaagaggaatgtgaacttcatcagagggttgaattcttttggagggttgaaggctcagaacaatgtgacattactaggccttcctgtgtgcactgagcagtgctttgcaaaggtggtgagctcattgaaatatccatcatcatcatcacgtaaggggagaggtggaggtgctgccttttcaacatgcaatgctgctggtgagattttccagattgcagccatcatgaatggccttgtgcttgttggggtggcaatagggtttgtccttcttcgagtcgaagcgtttgtggaagagtctgagtgagaattgcatcaacttttaa

SEQ ID NO: 52827 - DNA, 389 bp, Glycine max
  Clone ID: LIB3167-033-P1-K1-F11
agggactataacatcgatatgaaccctaagtttattatggctaatggcaatttggtgcgggtgctcatacatactgatgttactaagtatctctctttcaaagctgtggatgggagctttgtgtttaataaaggaaaggttcataaggtgcccgcaaatgacatggaggccttgaagtctccacttatggggctatttgaaaaacgccgagcacgcaagtttttcatttatgtgcaaaattacaatgagagtgatcccaagacccatgaagggatggacttgacaagagtgactactaaagagttgatagcaaaatacggtcttgatgataacactatagacttcattggtcatgctttggcgcttcatagtgatgatcgctactttgg

SEQ ID NO: 52828 - DNA, 441 bp, Glycine max
  Clone ID: LIB3167-033-P1-K1-F12
cctacgcgtccgaccacgcgtcctgctgaaaacaagaagcctgtggctggaacacccgtgcctggttcggatggtatctctgtcacctgcaagtacccagccgatccaactgttgcattggggtatctttctacagcatttgttgttgcatccactgtgattggctatatgtatctgttttacccttacaaaggaaagtctattccacaagggattttgtttaagcacaccactttcacagtgttcttcaacatatctttgttcaccgctggattagctgcagatatgcttttgtggcccacaattacaggacacattcacctggcacgcaatgtggaccaaaatcttaggtatgaatgccctacaagcaaaactggtctccttggaggcggcgcctttctatcccttgattcatctttcctttggttgattgcccttatg

SEQ ID NO: 52829 - DNA, 155 bp, Glycine max
  Clone ID: LIB3167-033-P1-K1-F2
ctttagaataagccttaatccttttcgcacctaaccggttttccaatagccatggttttttggcaaaggcaccgatctcaataaagctccatgcttccacctcctttttttttttttccaagtcctccttcaaaacgggaagactctgtttccag

SEQ ID NO: 52830 - DNA, 117 bp, Glycine max
  Clone ID: LIB3167-033-P1-K1-F3
ccaacgcgtccgccaacgcgtccgccaacccgtccgaaggttttaagggggagaagttataggctggcgtttgttggaaccgagaataacctgtttttggtgaatttgaaaattaag

SEQ ID NO: 52831 - DNA, 415 bp, Glycine max
  unsure at all n locations
  Clone ID: LIB3167-033-P1-K1-F4
cccacccttccgtttttattcaataataaagggatttctaccgagggatccggatctgcaacgaacggggggctggttccgccgggcaaggtggcattgataaccggaattaccggacaagacggttcgtacctgacggaattcctcctggacaaggggtacgaggtgcaccggctgatccgccgctcgtcgaacttcaacacgcagcgcatcgaccacatatacgtggatccccacaacgcccacaagggccgcatgaagctccactacgccgatctcttcgacgcctncttccttcgncgntggctcgacaccatcctccccgacgaggtctacanacctcgccgccagtcccacgtcgccgtctcattcgagatccccgactacaccggcgacgtcgtcgncaccggcgccc

SEQ ID NO: 52832 - DNA, 126 bp, Glycine max
  unsure at all n locations
  Clone ID: LIB3167-033-P1-K1-F8
nnnnnaaaaaaaaaaaaaaaaaaaaaaaaaaaaaaaaaaaaaaaaaaaaaaaaaaaagggaaaagggaaaaaaaaaaaaaaaggaaagaaaaaaaaaaaaaaaaaaaaaaaaaaaaaaaaaaaaaa

SEQ ID NO: 52833 - DNA, 450 bp, Glycine max
  Clone ID: LIB3167-033-P1-K1-F9
cccctttgaaatcctttctcagttctgcgccaactgaaacgcagatcgaactccgccgtagccatcatcaccgatcgaacttcgcaagacagagatcagattctgattccgacacagtaacagtatgagcgtcatcgacattctaacccgagtcgattccatttgcaagaagtacgacaaatacgacgtcgataagcaccgcgatgctaatgtctctggcgacgatgcctttgccagactctacgcctccgtcgacgccgacatcgaggccctacttcagaaagcagaaagtgcttccaaggagaaaggtaaggcatcagctgtagcgatcaatgcagagattcgtcgtactaaggctcggttgctggaggaggttcccaagttgcagagattagctgtgaaaaaggtaaaggggctttcattacaagaatttgctgtccgtaatgattt

SEQ ID NO: 52834 - DNA, 233 bp, Glycine max
  Clone ID: LIB3167-033-P1-K1-G10
cggggaccgacccacgcatccgtccacactccctcttcatcaatcatcattatctactttttcaacacacattaaaatgagggagggcgctttactttcagggagccctaattccttaaccaaatctattaaaaatatttttaaatgtttttctactagcactgcattaatccaaaattaaagtacttcttaaactaatatttacaactcgtacacataaacttttactacaa

SEQ ID NO: 52835 - DNA, 446 bp, Glycine max
  unsure at all n locations
  Clone ID: LIB3167-033-P1-K1-G12
cccacgcgtccgcccacgcgtccggtcttttcatattgatatcctttcaacacaacataggtggtcgaaaggatctcgaagacccaccaacgcacgaaagccgggatctttcagaaaatggattcctattcgaagggtgcataaccgcatggataagctcacactaacccgtcaatttgggatccaattcggttccttaggaggtatcgggaaggaattttggaatgtaataatatcgattcatacagatacagaagaaagggttctctattgattcaaacgctctacctacgagatagggatagagaaagaggaaaaaaccgaggatttcacatagtacttttggtcgaaaaatcgatctganttttttcgtacttttcgctcaatgatgaaatgggtcagattctacaggaccaaaccttgtgggagttaaggaatgatggaag

SEQ ID NO: 52836 - DNA, 302 bp, Glycine max
  Clone ID: LIB3167-033-P1-K1-G2
acaggaggaagagaggccacttaagtgccggccatggccgaatcgggaagcaccggaggcaccctggaggacgcggtaatgccggaggcatgcaccaccaccggatcctttttgacaggtaccaccctgggtttttcggcaaggtcggaatgcgctattttaacaagctccgcaacaaattttactttccgatcctaaacatcgacaagctctggtccctggttccgcaagaagtgaaggacaaggccttcaaggagaacaaggcgccgctgatcgacgtcacgcagttcgggtactttaag

SEQ ID NO: 52837 - DNA, 160 bp, Glycine max
  unsure at all n locations
  Clone ID: LIB3167-033-P1-K1-G3
cgcgtcgctgctccgtaccagtttcactgcataaatttgagagaaaactctgcanacatgttggtttatcaggacctccttacaggtgatgagcttctctcggactccttccgttacaatgaaattgagaatggaatgctgtgggaagttgaggggaagt

SEQ ID NO: 52838 - DNA, 448 bp, Glycine max
  Clone ID: LIB3167-033-P1-K1-G4
ggtcgaccacgcgtccgccaaccgttccgaccaggcaaagtgaaagtgggaaaaattaaaattcaaagagcttaatgtcggggatgattcacaagattggggagacccttcatgtgggagggcacaagaaggaggaggagcataagggtgagcaccatgctggagaatacaaaggggagcaccatggtgaacacagtagtgagtacaaaggagagcatcatggtgaacacaaagctggagagtaccatggtgagcacaagccagagcacaaagaggggttcctagacaaagtcaaggacatgatccatggtgagggcggcgcctccgagggcgagaaggagaagaaggagaagaagaagaggagcatggccatgagcatggccatgacagcagcagcaagagtgacagtgattaaactgctgcattacctatatatttaaaaggttta

SEQ ID NO: 52839 - DNA, 418 bp, Glycine max
  Clone ID: LIB3167-033-P1-K1-G8
cttctccacttgggcaagaaggtttaggtttagttggtggcgcaggaagctggctgtgatgcggacaaaggaacataccaaacaaggatgattttgtgctttcttcatctcagaagactatggcttctctttttaacaaagaagataacataatttccagtacccattctccacaaaatgtttttcttcctaatggccaaagtggtgagaacttcagccctgttacaggttcaagtggttatgatccttggttacaaagtgctctcttcccaccattgtcaggtggcccttcagctcaagagggagccactcaaaatgaaactatatatggttgcccaagtggatctgctagtagccatgggcttgatggttcttcagctaactgttgttccaaaaaggaaaggtctgtacatggttt

SEQ ID NO: 52840 - DNA, 349 bp, Glycine max
  Clone ID: LIB3167-033-P1-K1-G9
cccacgcgtccggtgcactgatgtgtcctcaaccgttgactcctcgttgaccatggtcatgggagatgacatggtgaaggtcattgcttggtatgacaatgaatggggctactcccaaagggttgtggatttggctgacattgttgccaacaaatggaagtgagagccaaacaaattctcattggtaattaaattattatgtatgtaccatgccattgtaattttgtatgcttactactactactaccactacaacacttgttgcttcatttttcttttaaacttgtactgagaaacagaaccatcaattttctctgccttctcattgtgcaataaaattcttaccttg

SEQ ID NO: 52841 - DNA, 349 bp, Glycine max
  unsure at all n locations
  Clone ID: LIB3167-033-P1-K1-H2
ggtcctggtttgcggaagcagattaagaagatggaagttagtcagcatagcaaattcttttgtgaattttgtgggaagtatgctgtgaagaggaaggctgtgggaatatggggatgcaaggattgtggtaaagtgaaagctggcggtgcctacactttgaatactgcaagtgctgtcactgtgcgcagcaccatccggaggttgagggaacaaaccgagggttgagctntttggttgatgttagattttgagcaaattaactggagaaatgattcgtttttgtttaggaagctgtattgtttcaacttacaatgcagtgtgaatggctttcggttcttggtggataata

SEQ ID NO: 52842 - DNA, 350 bp, Glycine max
  Clone ID: LIB3167-033-P1-K1-H3
atttgagttgcaaagcaaaattgttaaagccaaccaagagggaccttacctaggtttaatcataccaaattcttttgaactagaccctcttcttcagaatcctgcctccacagctagtgacaccatcatagacttcgctggaaggagatttcgcttttgagcctttggtgacaagcctgttatactggtcatgacaggattgagcgtgataaatgcagctataacgactcagcttctgttgagtttattcacggtagaaggagtggtgcattacggcattgctggaaatgcaaacccgtccttgcatattggagatgtagctattccccaatactgggctcatctagcac

SEQ ID NO: 52843 - DNA, 439 bp, Glycine max
  Clone ID: LIB3167-033-P1-K1-H4
ggagaattggtgggaatagccaaaggaggtggcaactgattattgaatagggtttttgattgatggagggcaataattggtgttagcgaagcttgataattgagatttatgggtcgcaatcgcagtcgcagtcgcagtgtgtcacgctctccttccaattcccgcagaagaaggtactctccatcccctgtttctcatcgccactcgagaacttccaggcgccgctctcctttccacaagcgccgtcgaaggcacagaacctctttctccccctctcttttacgcagccccactcccaaacccaagaaagatcaaaacaaaagcaagcgtcaacacgaggaaaagttgaaactattggaagaagagactgcaagaagactggaagaagcaattcgaaaaaatgttgaggagaagcttaacacagaggaagtcaagttag

SEQ ID NO: 52844 - DNA, 318 bp, Glycine max
  Clone ID: LIB3167-033-P1-K1-H8
gttgagaactaagaagaaggaaatggcttttttatttatctcctccccagctgttacgggctgcaaccgtgccggtgccggcatggttgctccattcaccggcctcaaatccatggctggcttccccacgaggaagaccaacaatgacattacctccattgctagcaacggtggaagagtacaatgcatgcaggtgtggccaccaattggcaagaagaagttcgagactctttcctacttgccagacctcgatgatgcccaattggcaaaggaagtctaataccttctaaagaaaggatggatttcttgcttggaatt

SEQ ID NO: 52845 - DNA, 55 bp, Glycine max; identical to SEQ ID NO: 38889
  Clone ID: LIB3167-033-P1-K1-H9

SEQ ID NO: 52846 - DNA, 359 bp, Glycine max
  unsure at all n locations
  Clone ID: LIB3167-034-P1-K1-A1
ccacgcgtccgccacccgtccgcccacgcgtcctcccacgcgtccgcccacgcgtccggtgaacttatggctgacggggtggttctgttggatacatgggccagcatgtttgggatgagggttaggattgcattagctgaaaagggtgttgagtatgaatacaaggaagaaaatctcaggaacaagagtcctttgcttttgcaaatgaacccaattcacaagaaaattccagttctgatccataatggcaaaccaatttgtgaatctgcaattatagtgcagtacattgatgaggtctggaatgataaagctncaatcttgccctctgacccttatgagagagctcaagccagattctg

SEQ ID NO: 52847 - DNA, 449 bp, Glycine max
  Clone ID: LIB3167-034-P1-K1-A10
cccacgcgtccgcccacgcgtccgcttgagaattcattctacttgcacggttactgggccgggttggttgatcggtatgaggagatgattgagaagtatcacccagggttgggggatgagaggtggccgtttgttacacattttgttggatgtaagccgtgtggagctatggagattatcctgtggagaggtgcctcagtagcatggagagggctttcaattttgcagataatcaggtgctcaagctctatgggttcaggcaccgtggtctcttgagtcctaagatcaagaggatcagaaatgagacagttagtcctttggagtttgtagaccagtttgatattcgaagacattctacggaaaacacggaatcaaagagctagtgagaatagtgttgttcaatggtggtattgtagagagtaattatttagaagtggagtttcatttgg

SEQ ID NO: 52848 - DNA, 441 bp, Glycine max
  Clone ID: LIB3167-034-P1-K1-A11
gtttctctttctctttctctgtctgcttcttcactttctctcgtttcaatcgaaaaaaatcatgggcagaaaattcttcgtcggtggcaactggaaatgcaatgggaccactgaggaggtgaagaagattgttactactttaaatgaagctaaagtccctggagaagatgttgtagaagttgttgtgagccctccttttgtgttccttccttttgtaaaaagtttgctgcgccctgatttccatgtctcggcccaaaattgttgggttcgcaaaggtggtgcttatactggagaggttagagctgaaatgcttgttaatttgggaattccttgggttattattggtcactctgaacggaggcagcttttgaatgaatcaaatgagtttgtgggagataaagttgcctatgcacttcaacatggtctgaaagttatagcatg

SEQ ID NO: 52849 - DNA, 420 bp, Glycine max
  Clone ID: LIB3167-034-P1-K1-A12
gattattcctcttcccattctagggttcccaaatggacgctggcggaaagatcaagaagggcgccggatgaagaaagggcggcggccctaagaagaagccggtttcaaggtccgtcaaggccggtctccaattccccgtcggaagaattggccgttatttgaagaaaggaaggtacgcccagcgtgtcggtaccggtgctcccgtttacttggccgcagttctcgagtacctagctgctgaggtgcttgagttggctgggaatgctgcacgtgacaacaagatgaacaggattattccgagacatgtgctgttggctgtaaggaacgatgaggagttggggaaattgcttgctggtgtcaccattgctcatggtggtgttcttccaaacattaaccctgttttgctacctaagaagactc

SEQ ID NO: 52850 - DNA, 472 bp, Glycine max
  unsure at all n locations
  Clone ID: LIB3167-034-P1-K1-A2
cggaacgaccgagtcgtccgcacgcgtacgaacatcaccgaagcggtgacagacagaggaaaatgggaagcagaggtccacctcaggcccatcgaaattccgctgccatttccaagggttacaacttcgcttccacttgggaacagaatgctcctttgacagagcaacaacaatccgcgatcgtttcgctttctcacgcagtatctgagcgaccgttgcctcgcaagttggctcaagaaaatgcgtcggtgcaagacaatgccttatctgttaaaacgaaagatagttcttttgatgactctggtgctattgagactgttatggtcaataccaatcagttctacaaatggtttacggatcttgaatctgccatgaaatcagagacagaagagaagtatcaacattacgtgaacactctaactgaccgcatacagacatgtgatgaaattctncaacaggttgatgacaccct

SEQ ID NO: 52851 - DNA, 397 bp, Glycine max
  unsure at all n locations
  Clone ID: LIB3167-034-P1-K1-A3
gagacggctctggcatggcttatgtggctacctcaaaaacgctagcttgaagcagtatgtggactctgctaatgcccgaaaaaccgttgcttcttgtgggattccctttccaacttgttaattaattaagccttcttataattaaagagtgggatatatatatatatatatatatatatatatatatataaacagnttaatttatacacactttgatcctacaaagcatcttgacacaagcattcaataggatttcaccactttatcgcaacattttaacatgatgcggtaataaagtaaattcttgttgaatatttggataacgatgttatatactcatagtttgtgtgtataaattaaaacttatatttattatttactctatatatgtcactct

SEQ ID NO: 52852 - DNA, 413 bp, Glycine max
  unsure at all n locations
  Clone ID: LIB3167-034-P1-K1-A4
cccacgcgtccggcaaaattggcttcattcaccatgacagcttccatccttggctgcccagccgtcaccaaccggtcggcagcgacgcagaggagatcagtggtagtgaatgcagccagcaaatctgttgaaggggaaaaggtcagttatgacaacaatggtagcaatgcaaggaggaacttgatgttcgccacggcggcggctgctgtttgctcttttgctgcatggatggcattggcagatgagcctaaaccaggatcctcagaagccaagtaaaagtatgccccagtttgtgtcaccaatcctacagctaggatttgtcgcaatagaggaacttttttgtttcacttttggaatttggaaatgtacaatgaatttngtggaaggctttgatgatttcatttcattctcac

SEQ ID NO: 52853 - DNA, 447 bp, Glycine max
  Clone ID: LIB3167-034-P1-K1-A5
cacacacgttcgcccacacgtccgtatctatgtctttctcataatgctgtcctatctccgactccctttgtcaattagagctgtctcgctcctttctctttccctgaaaacatctcatcttcgtatcgatgcctgaaaagggtcctccactgcccaaactaggagattgggatgtcactgatccagcccaagctgaggggttcacagtgattctcaatgaggccaggtatgtgaaaaagacatgtggcttcccacagtcaccaggacagactgcgttccgatcctgattgcaaacctgcagcagagcctggctaaactcagactaagaaacggctccgcagcatgcaataccattctgccgaatcataacatagcaataggcgctcctgtgaaaagcctgaacagaagaacaatcgttatgtgtaactagcgtcacagtattttctc

SEQ ID NO: 52854 - DNA, 453 bp, Glycine max
  Clone ID: LIB3167-034-P1-K1-A6
atatatccaatacattgttatactatcgacgacattatggctgcttcattctcaagcatgctcattattgcctcttccaaaataagctacgaagctagcttgggaggattaagcttccacaacttcctaacagcaaaatcaccacctctgagaagccacaacctccagctgcaagattgaatactgatgatctttgccgcagaactgtctctcttctagaagaatatttcagtgttcggcttttggaagaggcattacagtgtgtggaggaattaaaatctccttcttaccaccctgaggttgttaaggaagccatataccttgcacttgataaaagtccaccatgtgttgaaactgttgccaatctcattgagtatctgtatattaaagaagattcttacccctttagacatagggacctagctgtttgttattaggtctctgctggatgat

SEQ ID NO: 52855 - DNA, 459 bp, Glycine max
  unsure at all n locations
  Clone ID: LIB3167-034-P1-K1-A7
acgcgtacgcacaaccaaagcaacaccccaaatggcttcagcttctgttcccatggcgttgtcactgagctctgttaccaacaacaacaagccttcatccgaagccttcttcaggccactacccctacgccaaccaaagaggaccctcttcaccacgaaggcagtgtcaaactccaagcctcaaatcaatgcatctttgaaggagaaggcagttgccggactcacagcagcttctgtgacagcatctatggtggttccggaggtggctcatgctgctggatatgagttctccccttccctaaagaactttctactcagcatctttgctggtggggttgttctagcagccatatttggagccgttattgaggttttcaactttgatccggttaagagaacttaaatcatgcatgctccaatgcttttcattntctctctctcttttcactcttcttctag

SEQ ID NO: 52856 - DNA, 503 bp, Glycine max
  Clone ID: LIB3167-034-P1-K1-A8
cccgggatgaccgggcttgaactcaaggagatggctctgggaagaggcagtgcagtggttctactactttgcttcttgctgcttcactctcagatggctcgtgctgccacctacacagttggagattctgggggttggacctttaacactgttgcctggcccaaaggaaagctctttcgggctggtgacacacttgctttcaattatagccctgggactcacaatgtggtggccgtgaacaaggctggatatgatagctgcaagactccaagaggagccaaagtgtataagtcagggacggatcagatcagacttgccaagggacagaactacttcatctgcaattatgttggtcactgcgagtctgggatgaaaattgccatcaacgctgcctgagtttaataatatggttaacttcccatacatattgtattgtaatgcaaattgcaccctttagtgggaagttaagctccttaaataatggtaagaaaaaaagtagctat

SEQ ID NO: 52857 - DNA, 467 bp, Glycine max
  Clone ID: LIB3167-034-P1-K1-A9
gatcaccaaagtacttgtgagtgtatacccaacacaaactaagatcaacatggactggtacacgcgcgtttcagaagttgagagggaacctatcatggagtattccacaccacgaccaatgatgggcaactaccaccaccctaatgctcaccgtgtcctcaacgagaagattgtttatgaggaggatgtgattggaggatcccgccacaaccacatgcatcaccaccaccctgagactcatgagagagtcaaggtggtggagtatgaacaagttcctgagaggcgcgttgtctatgaagagaaagttgcttatgacaacgatcgttactactctccaaggtattgaaattggacaaatggaagaacacctattacgttttatcatgtggctttttattaggcaggctacctagtataccaaaagcaccactgtgctggtactaaatatattcctgcttatatatact

SEQ ID NO: 52858 - DNA, 410 bp, Glycine max
  Clone ID: LIB3167-034-P1-K1-B10
caaaacactcataccacatagcacaaagcaaagctcatccttgagataaaaaaatggcggcggcttattacatggctctcgcatccccatccttggctggcaaggccgtgtagctgggcccatccgccccagaagtgggaagggtgagcatgaggaagaccggcaccaagcaggtctactcaggaagcccatggtacggcccagaccgagtcaagtacttgggcccattctctggcgagcccccgtcctacctaaccagtgagttcccaggcgactacggctgggacactgctgggctttccgcagacccaaaaaccttctccaagaaccgtgaactcgaagtgatccactccaggtgggccatgctcggagccttgggctgcgtcttcccggagttgctagcccgcaac

SEQ ID NO: 52859 - DNA, 395 bp, Glycine max
  Clone ID: LIB3167-034-P1-K1-B11
attgctagaatggaatttcgatgctcagtcatctcttttaccattctcttctctcttgctctggcaggagagagccatgtccatgcatcgctacctgaggaagattattgggaagctgtttggccaaacactcccattcccactgcactgcgagagcttctaaagcctctccctgcaggtgttgaaatcgatgaactccctaagcaaattgatgatacacagtacccaaaaacattcttctataaagaagaccttcatccaggcaaaacaatgaaagtacaattcaccaagcgtccctatgcacaaccttatggtgtatatacatggttaacggatattaaagacacctctaaagaaagatatagttttgaagagatatgcatcaagaaagaagc

SEQ ID NO: 52860 - DNA, 462 bp, Glycine max
  Clone ID: LIB3167-034-P1-K1-B12
ctttcacagcacactcctcccaaggtttctccaccaagagggaaatggctcccaaaccgcctggtacaggtctgtttgttggactgaacaagggacatgtcgtcaccaagaaggaattgcccccacgcccctcggatcgtaaggggaaaacaagcaagagggtgcactttgtgaggaacctcataagaaaggttgctggttttgcaccctatgaaaagcgtataactgagttgctgaaggttgggaaggataagagggcacttaagggtgcaaagagaaagcttggaacccacaaacgtgcaaagaagaagcgggaggaaatgtccaatgttcttaggaagattaagggctggtggggctggaaacaagaagaaataaggcttatttactcttttctaggttcactagatggacctgtgttttgatggacgaactttcattattttgctttggatcaattag

SEQ ID NO: 52861 - DNA, 433 bp, Glycine max
  Clone ID: LIB3167-034-P1-K1-B2
ctttcacactttcacttgctctctctttgctcttatcccttttcttttttcttcttttccttggggttttgtattctcaggttgcggagtttgatagaaataatggatcggaacgggccaaagatcaaaagtacaattcttcaccatctctatgagaagcagagacagagcccttactatgacaatctctgtcgccctgtttcagatttgcttccatttattgccaatgggatcagaggtgtcactaccaacccagcgatttttgaaagagctatttcatcctcaaatgcctacgatgatcagttgagggaattggtaggggcagggaaggacatagaaagtgcttattgggaattggttgtgaaggacatacaggatacttgcaaacttctggagccaatttacaatgaaacagattgggaagatggacatg

SEQ ID NO: 52862 - DNA, 448 bp, Glycine max
  unsure at all n locations
  Clone ID: LIB3167-034-P1-K1-B3
cccacgcgtccgcgtgaatcgtgatttagtagtgatacgcacacactcgcacgtccacttccggattctcaattctctcttctccaaaaatctcataccataagtttctactacttacctttagtagctgcttttgcttacaaacacctacgctctctctctctctctctctctctcttcaggttgggaattagtgcctttggtggtcaccatgttccttcttagaaggcaaacccagaatcaccatgagaatgattcctcatatcaagatacaaaggtggctgaactcaagacagctcttgggcccctctctggtcgtcaattaaagtattgcacagatgcatgtctaaggagatatttagaagcaaggaactggaatgttgataaaaccaagaaaatgctggaggaaacactngagtggagggcaacttatatgccagaggaaatc

SEQ ID NO: 52863 - DNA, 235 bp, Glycine max
  Clone ID: LIB3167-034-P1-K1-B4
gcagctggtacaaagtgcgcttgatgggtacaaggtctgtatctttgcttatggacagacaggctcaggcgaaacctatacaatgatgggtaggccggatgcccccgatctgaaagggttgataccacgttctctagaacagatattcgagattagtcagtccttgaaggatcaaagatggaccttcaaaatgcaagcttcagtattggaaatatataatgagaccatcagagat

SEQ ID NO: 52864 - DNA, 407 bp, Glycine max
  Clone ID: LIB3167-034-P1-K1-B5
gtttgattgagagagaagcttttctttaagcagaaaggggattagagactgctgaagatagaggtgtagtgataagaaagcaatttgtttaaacaagggattggtttcaaactggctggtgttgttctgtatatgaattcgttgccatcttcggaagtgtggattttgcccggagcagctgatccatataattgttctcagattcaagtgaacgtctcttggagggaagtctgttcttattttgcccagtcattagataaatatgtataggtgcagtttggttatgcatttgaaacttacttttgcttaaacaagtaaaattgatgatacattggactgctcctttggaaaggtgttttatttaataattattttataatttttttttttatttttattattttttt

SEQ ID NO: 52865 - DNA, 385 bp, Glycine max
  unsure at all n locations
  Clone ID: LIB3167-034-P1-K1-B6
aggactttgactttgtaaaatccagtctctcggcttagggatttgatgttgtttatgacataaatggaggtgaggcagatgaagttgagcccatactgnttgcgctgcctaatctggaacagtttatttactgctcttctgctggagtctatctcaaatctgatctattacctcatgcagagacagatgcagttgatcctaatagcagacacatgggaaagcttgagacagagagtttgctgcaagcaaggtgtagtaattggtactttataaggccagtctatatctatggacccttgaactacaacccttgttgagagtggttcttccatagattgaaagcctgacgcccaatttctatccccagctcatgactacagataac

SEQ ID NO: 52866 - DNA, 469 bp, Glycine max
  Clone ID: LIB3167-034-P1-K1-B7
ggaacccttctacgtgttctccattccctctctcactcctccatctacgtttcttggatcattgccttctttctctctttctttatcttctcattttcctcattacactcttttttttctctcaacttttctcttattaaccatagttcacatattatatcatcacatatcatagtgatatattatatcatatcacaatgtgtggcatacttgctgtgcttggttgctctgattcatctcaagccaaaagggttcgcgtccttgagctttctcgcagattgaagcaccgtggtcctgactggagtgggctccaccaatatggtgataactatttggctcatcaaaggttagccatagttgatccagcttctggtgatcaacccctcttcaatgaagacaaaactgtcgtggttacggtgaatggagagatctacaatcatgaagaactcagggaacagttgcctaatca

SEQ ID NO: 52867 - DNA, 460 bp, Glycine max
  Clone ID: LIB3167-034-P1-K1-B8
gttgaaaaataacacgggaactaaagccatcaaaagcataacttttaacgtctcaaaatttgatgaggtgtgtttaagtcctcaaatctttgaaaggatgcaacagttaaaatttcttaattttacccaacattatggcgatgagcaaatcctgtatcttcccaaaggccttgaatctttgcctaatgacctaagactttttcattgggttagttatcctttgaaatccttgcctctatcattttgtgctgaaaatctcgttgagctcaaattgccttggagccgagtggaaaaactttgggatggaatccagaatcttgaacatttaaagaaaattgacctgagttattccaaaaatctgctagagctcccagatttttcaaaggcctcaaatcttgaagaggtggaactctatagttgcaaaaactagcgtaatgttcatccatctattttatctctc

SEQ ID NO: 52868 - DNA, 361 bp, Glycine max
  Clone ID: LIB3167-034-P1-K1-B9
atttctctcttctctctgcatcgcttcaggttcttctgaaaagatgtctcgcgtgtatgttggtgaacttggattcacgagtcaccgagagagatctcgaagacgaattccgtgttttcggagttattcggagtgtttgggttgcacgtagaccacctggttatgcttttattgactttgatgaccgcagagatgcacaggatgctatccgtgaattggatggcaagaatggttggagggttgagctttctcacaactctagaggtggaggtggtggtcgtggtggtcgctctggcggttctgatttgaaatgttacgagtgtgtttaacctggtcattttgctcgtgaatgtcgcatgcg

SEQ ID NO: 52869 - DNA, 325 bp, Glycine max
  Clone ID: LIB3167-034-P1-K1-C10
gaaaacgtgtgagaactaaaagaaggaaatggcttctatgatctcgcaggtgtccaccgtaaccggccgtccgctggtgtcattcaccggcctaaatcatggtgcttcccacgggaagaccaactgcattcctcatgtgcacggggagagctgctgcaggggcccatgcagagagtcggactttctcttgcgactgtgtcccatgcaaagagcgatcctttaggaagaggttctgtggatcggtgagccggttggtccgggccacagcaccggtcttgtgcgctcgacctgggagcgcatgtgctgactgtctttaggtgagact

SEQ ID NO: 52870 - DNA, 93 bp, Glycine max
  Clone ID: LIB3167-034-P1-K1-C11
cccacgcgtccgcttgaacttgtgctttgcatctctggtttaagtgctgctgtttattatgttgtaaaatgatgtattgaactcgtttcagcg

SEQ ID NO: 52871 - DNA, 468 bp, Glycine max
  Clone ID: LIB3167-034-P1-K1-C12
ccggccgcaagatcattatcgatacttatggaggatggggtgctcatggtggtggtgctttcgccgggaaggaccctaccaaggttgataggagtggtgcttacattgtgagacaggctgctaagagcattgtggcaagtggacttgccagaaggtgcattgtgcaagtgtcttatgccattggtgtgcctgagcctttgtctgtgtttgttgacacctatggcactgggaagatccatgataaggagattctcaacattgtgaaggaaaactttgatttcaggcctggtatgatctccatcaaccttgatctcaagaggggtggaaataacaggtttttgaagactgctgcctatggacactttggaagagaagaccctgacttcacatgggtagtggtcaaacccctcaagtgggagaaggcctaagttattcattccactgctctatgcctggaagtttttgagc

SEQ ID NO: 52872 - DNA, 332 bp, Glycine max
  Clone ID: LIB3167-034-P1-K1-C2
cccacgcgtccgcgccacacgtacgcatacgcctttttccaataccattgataaaagcaaattggggaagattcgctgcattggtgctggatatcctcttaacactactatggcagtgatcgctcttacatgcccattcatcgaagacgctaagggtgatatctctaaataccacattgcaggctagcacagcgaccagctccctatctatgaaccaggccttgatggtgctgtgaaccaatgcctagacaagaaccgtttcttcagcactgatgtctaaaagcatgtctttaaggctaacatacctgttagctttgtcaacaccccaacca

SEQ ID NO: 52873 - DNA, 479 bp, Glycine max
  Clone ID: LIB3167-034-P1-K1-C3
gcgggaactttccgaggtaagctcaattcaaccccagttttgatgttttgtttccgccttgttctctatcatggattcatcatcgagtaagcagatagatccctcccattccatcggaggatgtcattctatatattactactaatcaaactagtttcttcgaaaaggtgagggtactactactagtattactgcggcaatttgtaatatcattcaaattgctcaacctcaggaggagcattaaaaagtgagtgttaggtccaaatgcacatcacgtctatcttggttcttgtgcaggtctgctctgtctcctgatgtccagcatgctttctcctcagagattctaagttagatttttgtcattattttgctttatcgtcgtctaacacaatactacttgctttactgaactccaaatatgtgccctaaaattgtgttacacaggtcattgccttgaccgaggaactccttgcaactgc

SEQ ID NO: 52874 - DNA, 145 bp, Glycine max
  unsure at all n locations
  Clone ID: LIB3167-034-P1-K1-C4
cggactcntgggtaagcctcgaaatccaaaaaatcttaagcgtagatgatgcacatgaccttgtactggagcagaaaggggaatctcctaatcgattcatggaagaccaacgattggacggactatctncttactctgctcgcgt

SEQ ID NO: 52875 - DNA, 101 bp, Glycine max
  Clone ID: LIB3167-034-P1-K1-C5
gtgtttctttaggtttgaataaatgatatttactttataattttaaaaaaaaaaaaaaaaagggggaaggggaaaaaagagaaagggggaaaaggatttag

SEQ ID NO: 52876 - DNA, 342 bp, Glycine max
  Clone ID: LIB3167-034-P1-K1-C6
gtcgagccgacgcgtccgcattttttctttttcaatttttaattgtctctgattttctcgtagaacgcgtttcttgccacgccgaaggacaagaggaagaaattggaagttttcaaggatgttagaacagttactgatatttacaagaggagggttaatcctctggacttgtaaggaacttgggaacgctctgaaaggttcacctatcgataccttgatccgttcctgtcttttggaggagcgatctggtgcggcagcatacatttatgatgcccctggtgctttctacaccctcaaagtggaccttccacaatgatcttggtcttggttttgtggctgttt

SEQ ID NO: 52877 - DNA, 448 bp, Glycine max
  Clone ID: LIB3167-034-P1-K1-C7
cgagctgagaataccagttgctccagtagccggctctaaacaacatggcggacaaggcagtcaccatccgaaccaggaagtttatgacaaacaggcttctctccagaaagcagttcgtcgttgatgtccttcatccagggagggctaatgtttccaaggctgaactgaaggagaagctgggaagaatgtatgacgtgaaagacaccaacactgtatttgtcttcaagttccgaactcattttggtggtggcaagtccactgggtttggtttgatctatgattcagttgagaatgctaagaagtatgagcctaaatacaggcttatcaggaatggacttgataccaaagtagagaaatcaaggaagcaaatgaaggagagaaagaatagagctaagaagattcgtggagttaagaagaccaaggcattttatgctgcaaaggcgggaaa

SEQ ID NO: 52878 - DNA, 444 bp, Glycine max
  Clone ID: LIB3167-034-P1-K1-C8
gtgaacatctgaatccaaacccatcaagatccgaaatccacatccaaatcgttttgtggctcggtcaatccctcaatctaagtttaagctgcaaatccaaccgggtcattattggttcgaacccacaactattctctgtgcatttatacactaaacagatcccttttccgattggatcgacatggaatttcgtaattttgacccaagatacactggggagttattgaagcacatggatagtcagaatgaggtccttatggaagcatatagatccatgttccatgaattgcggaaacttcaggtcgaagaagagatgcttatgcgcaagatgcatgaagttatgtcagctcatggtcccactaaaagtgtagatgaagaagtaccagttgcacctgaagcagtactagctactagagtaggtgagcgaattggctagacaatttc

SEQ ID NO: 52879 - DNA, 362 bp, Glycine max
  Clone ID: LIB3167-034-P1-K1-C9
cgtctatgtcgattattgggaacgtgcagcagcaggggacacgtgtcagcttcgagctagcagactctttggtgggattctcgcccaacaagtgctagattagatagatcttgtaatttacatatttaaccctgttgttgttattaataatttatggtgatatatagcggtaggtttctattattaaaagccatcgagagtgtattttatttaaatttgttcaatcttcatcttctaatgtccttgggttattcttttttttttcttttctcattttttaattttgtttttttttattttgtatggggggtggtgggttctattttttttatttttttttttttttattttaattatttttt

SEQ ID NO: 52880 - DNA, 455 bp, Glycine max
  Clone ID: LIB3167-034-P1-K1-D1
aaaccctacttctacttcccccctttgctctcaaaccttatcacctaatccttatcctcccaggccagaggaccatgtctacctccgcagcttccctcgcactcccaaccctcactctccgaacccgacaacctctatgttctccccaatgcttctcctcgtccctctccctcacacccaacaacaaacccatttccatttctgctgtttttctcaaaccaacaactctgtcgtcgtctcgcttcgttccccacgtcgtggtgtcgtcggatttggggcaggaggaggacaccttcagtgacggagacggccccagcttctcccccgaccttaagctctttgtcgggaatcttccgttcaacgtcgacagcgcgcagctcgcggagctctttgagagtgccgggaatgtggaggtggttgaggtgatttatgataagactactgggaggagcagg

SEQ ID NO: 52881 - DNA, 291 bp, Glycine max
  Clone ID: LIB3167-034-P1-K1-D10
gcgccgccggtgccgtcgacccacctcatgcatcatattggtgctgcaagggctgactcttacctctctctgggtgaccaaagacgaaacactttcattactttgcttcaaagctgaggaggattttactaactcgtactgaaaagtgaaagtgcggggagggcatgatgtcggtgggacgggaagataaaagacggaattttgacggggaatgttgatgcaagttggctaagagctgccagtgcgaagaggtaacaccgacagggtgaagatggctaagtcaacttgcct

SEQ ID NO: 52882 - DNA, 480 bp, Glycine max
  Clone ID: LIB3167-034-P1-K1-D11
agagttgttaccatttgctcccagtacagagcttaaccgagcttcacaaagatgaatcgggagggagttgatgaagatggccggttcggttagaactgggggaaagggtaccatgagaagaaagaagaaggctgtccacaagacaacaaccacagatgacaaaaggcttcagagcaccctgaagagaataggggtgaatgccatcccggctattgaggaggtcaatatctttaaggatgacgtagttatccagtttctaaatcccaaagttcaagcatccattgctgctaatacttgggttgtcagtggttctccacaaacaaagaagttgcaagatatactccctagcattatccaccaattaggaccagataacttagaaaacctgaagaagctagccgagcaattccagaagcaggctcctgaaggagccgtcggttcaaccacagctcaagaggagaatgatgatgacgatgtccc

SEQ ID NO: 52883 - DNA, 478 bp, Glycine max
  Clone ID: LIB3167-034-P1-K1-D12
cccacgcgtccgctgagtttatgtggttgcgcctctgcctgtaagagtgaaaaaaccttctcttttccttctctcaagtctcaagagatttcatcatggctccaaagaaggacaaggctccaccaccttcctccaagcccgccaaatctggcggtggcaagcagaagaagaagaagtggagcaagggaaagcaaaaggagaaggtgaataacatggtgctgtttgatcagggcacctatgataagctcctttctgaagctcccaaattcaagctcatcactccttccattctttctgatcgtttgaggattaatggatcacttgcaaggaaggctataagagaattgatggctaggggttcaatcaggatggtgtctgcccatgcaagccagcaaatttacaccagggcaacaaacacctaggtgtggaactgatcttagcttacggagtattggtaggaatagtaatgaagtattgt

SEQ ID NO: 52884 - DNA, 464 bp, Glycine max
  Clone ID: LIB3167-034-P1-K1-D2
gtttctctctctagctgggacgagtgaattagattcatcatcaagatgtcgtctctgatagcaggaagatgtgaagagcagatcagaggtgtaccacggggacgaaatgtgccaagtgaagtccaaggagcttctcaaggaaatcgccctccccaacggccttcttcccctcaaggacatggaggagtgcggctacgacagacaaaccggcttcgtctggctcaaacaaaagaagagttacacccacaagttcgacaagatcggaaagcttgtctcctacgcgcccgaggtaactgctcatgtccaacaaggtaaaattaccaaactcaccggagttaagaccaaggagctcttgctctggatcacgctcagtgatatctatgttgatgaccctcccactggcaaaatcaccttcaagacccctgccggcctatttaggtcttttcctgtctccgctttcgaga

SEQ ID NO: 52885 - DNA, 465 bp, Glycine max
  unsure at all n locations
  Clone ID: LIB3167-034-P1-K1-D3
gcactgggcttctccctcttcttggggaggtttgtgttcttcaacttccaaagggagaacgtgggaaagcaagtgcctgagcagaacggactcacacactttgaggctggtgacacacgtgccaaggagtatgtcagcctcctcaaatccaatgaccctgttggattcaacattgttgatgtcttggcttgaggctccattggccatgttgttgcttactatatcttggccaccactagcaatggctatgaccctgcattctttggctgattntcatcatgttccattgtctntctttgcttgctttttactatgttataatagaatcaatgtcatcatgtataggttctctctaagatccaacaagttcagcatatgctaatttggtcactcttttcgcctgctatttggttaatggaaaatggattctccttattatcaaaaaaaaaaaaatataaaaagggc

SEQ ID NO: 52886 - DNA, 60 bp, Glycine max
  Clone ID: LIB3167-034-P1-K1-D4
atcagcgtgtctgaaattgaagaaattggagcagaggaggaggagcttttaggtgtggcc

SEQ ID NO: 52887 - DNA, 116 bp, Glycine max
  unsure at all n locations
  Clone ID: LIB3167-034-P1-K1-D5
gggtaggcgacgcgttcgaccacgcctgcgnccacgcaagcttaagtattatcttttgccacctaaataccttctcactatggtgccgagagcttctagctgtgcgaactccctct

SEQ ID NO: 52888 - DNA, 451 bp, Glycine max
  Clone ID: LIB3167-034-P1-K1-D7
cccacgcgtccgaccaaactcagaaccaaactcgccaaaactagggttttgcattgatggcactgtgcaaccgcgtcagatcgggaatctctctcttcaccaaatccacgttccttacttcccagcgatccagtctccaacgatccctcgttgcccctttcatttccctcgcctccagaaattacgccaacgtgccggggcaaaaggaaaccaaagttaaggtccctctggctttgtttggaggttcaggaaactatgcctctgctttgtatattgcatctgtgaaagccaatgcagtggaaaaggttgagactgagcttctgcaatttgttgaggcagtaaagaatagtcccatattttcacagtttataagggacttgtctgtggctaaggatgttagagtgaaagttatccaggatatttgtggggaagccaagttttcggatgttac

SEQ ID NO: 52889 - DNA, 470 bp, Glycine max
  Clone ID: LIB3167-034-P1-K1-D8
cccacgcgtccgactagaaacagtgtgatgaaaatgaaggtccttgttttcttcggggctacagttttggtagcatggcaatgccatgcgtacgatatgttccctctccgaatgaacactggctatggtgcccgtactccggaggtgaaatgcgcaagttggaggcttgctgtggaagcacacaacatctttggctttgagaccattcctgaagagtgcgttgaagcaacaaaggaatacatccatggcgaacaatatagatcagactccaaaacagttaaccaacaagcttacttttatgccagagacctcgaagtccatcccaaggacacatttgtgttcagtatagatggcaccgtactctctaatattccatactacaaaaaacatggatatggggtggagaaatttaactcgaccttgtatgatgaatgggttaacaagggcaatgcaccggcactgtccgagac

SEQ ID NO: 52890 - DNA, 470 bp, Glycine max
  Clone ID: LIB3167-034-P1-K1-D9
cccacgcgtccgccacttgctcctgagccatacaatacaaaaaaaaaaagtcgcttgtttttattttttctttccaatcatggctggtgtgaaccccgaggcaggagggtggaaggcttatccttctgttatggagactgctcttggtagtagtggtgatggaaggcgtggccataacatgaatgatgatgggtcggtgatgcatttctctgctacaaggccagtggcagtgccatcatctggacagaataaagtagttcctagtccaactcagtttagcatcctctacaaggggaaaatgtgtatctatgaaggaattcctgcagaaaaggtgcgtgaaataatgttgattgcttctgtctctgctaagtctgctgaaatgaagagtgggatacccttgacttcattcattcccaaaagcccttctttttcacagggaaactctactatattgccttcaccacaatcag

SEQ ID NO: 52891 - DNA, 445 bp, Glycine max
  Clone ID: LIB3167-034-P1-K1-E1
gataactagaaacagtgtgatgaaaatgaaggtccttgttttcttcgttgctacaattttgggagcatggcaatgccatgcgtacgatatgttccctctccgaatgaacactggctatggtgcccgtactccggaggtgaaatgcgcaagttggaggcttgctgtggaagcacacaacatctttggctttgagaccattcctgaagagtgcgttgaagcaacaaaggaatacatccatggcgaacaatatagatcagactccaaaacagttaaccaacaagcttacttttatgccagagacctcgaagtccatcccaaggacacatttgtgttcagtatagatggcaccgtactctctaatattccatactacaaaaaacatggatatggggtggagaaatttaactcgaccttgtatgatgaatgggttaacaagggcaatgca

SEQ ID NO: 52892 - DNA, 454 bp, Glycine max
  Clone ID: LIB3167-034-P1-K1-E10
atttcagtctcaaacggagtgttaagggaagaactcctcaaatggagacacctttagtgatgcagaagttcacttcagaatctgactacttgccggtgaaaagcttgaaggatttgaagtttgttttgtggacagagacagtgaagatatggagaatagcattccctatggcactgtctgcactgcttcagtttctcacaatctcctcaacttccatctatgctggccatcttggagacattgaactttcttctatctctgtttaccaaggtgtcatcagtgccatctattttgacttgttgtttggtatgtcatctgcattggtaacactttgtggccaagcttttggagcaggacaaattcaatcaacttgtatttatgttcaaaggtcatggattatacttactgccacttgtataatcctcttgcctatttatgtatgtgccactccaat

SEQ ID NO: 52893 - DNA, 339 bp, Glycine max
  Clone ID: LIB3167-034-P1-K1-E11
gcccacgctcgatcgagataactgaaacaggggaaaagaagcctgttttgtgtacaattgtgatggaatgccatgctcattgtccttcaatgaacactgcttggcccgactcaggaaagccagtggagtgctggaaccaccatttggttgaaatcctggagggtgacacaaagatctcatgcgaacattataactcaacgtaccaacagtacttttatgccaaacctaatccatcaaggacacattggtagataaggaccgactttattcatctcaaacaggttggggggaatactgactgtgagaaggtaacaagcaatgacgcctgccaattaaata

SEQ ID NO: 52894 - DNA, 465 bp, Glycine max
  Clone ID: LIB3167-034-P1-K1-E12
cccacgcgtccgcaagaaccactcctacaacaacaagcttggtaatgaagctctcccacccatgaaaacccaggctggaacactccaacacccaccacaacctgcttcatcagactatgcttttcccatatttgtcattgttgtgctcagcatcttggccactgttctgttgctcctcagctacttcacttttctaaccaaatactgctcaaactggcgccaagttaacccaatgagatggatttccatccttcgagctcggcacgaagaggaccccttcatagcattctctcctgccatgtggaaccgagggcttgatgagtctatcatcagagaaatcccaacttttcagttcataaaaggagaagaaggtgaggaccaaagtgtatatggttgtgtggttagtttgactgaggtcaaggaacaggatgtgctaaaagttcttcccaattgcaaccatgcttt

SEQ ID NO: 52895 - DNA, 468 bp, Glycine max
  Clone ID: LIB3167-034-P1-K1-E2
ctagattcagccacagttggaaaaaaaaaaaaaagttgttcgagatggcacgtacgaagcaaactgctcgtaagtccacaggaggaaaggcacctaggaagcagctcgcaaccaaggctgcacgtaagtctgcaccaactactggtggtgtgaagaagccacatcgttatcgtcctggtaccgttgctcttcgtgagattaggaaataccagaagagtaccgagcttttgatcaggaagctccccttccagaggctggttcgtgaaattgctcaagacttcaagactgatctgcgtttccagagccatgctgtgcttgcattgcaagaagctgctgaggcataccttgttggactctttgaggatactaatctgtgtgccattcacgctaagcgtgtaactattatgcccaaagatatccagctggcaagaaggattcgtggtgagcgtgcttgattgtgtggtggtg

SEQ ID NO: 52896 - DNA, 444 bp, Glycine max
  Clone ID: LIB3167-034-P1-K1-E3
cccacgcgtccgcttaatccaaatatcatcatctgaaacgatggctgccatggcaaccacaacggtctcgtcaaacccgaaactctcatttttccacggaaagcccgttacatattcttcccgcgtcgcacccaccaccaagttattctcatccaaacaaggcacaatctccatgtccctaacccaacccccatacgacctccaatccttcaaattccaacccatcaaagaatccatcgtctcacgcgaaatgacgcgccgctacatgaccgacatgataacctacgccgacaccgacgtcgtaatcgtcggagccggctcggcggggctctcctgtgcgtacgagatcagcaagaaccccgccgtgagcgtcgccataatcgagcagtccgtgagccccggcggcggcgcgtggctcggcggacaactcttctccgccatggt

SEQ ID NO: 52897 - DNA, 438 bp, Glycine max
  Clone ID: LIB3167-034-P1-K1-E4
atctgtgacgagcatcatggcctcgagagcagtgctattgttggctatgtgtgtgcttccggcgcatgggtgtggccattcgcccagcaaagaaccctttttgcgtgaagggtcgcgtctactgtgacccttgccgagctggttttgagacctcagcaaccacctacattgccggtgctgagattatgttgcaatgcaagagcagggttagcaacgaggttgtgtacaccaagaaggggtacactgactcaactggagcatacacaatgtacgtggacgaggatcacgcagatcaaatatgcagtgccaagctcgtaagcagccctcaccctcaatgcaaggaagtcaccccgggccgtgacgaagccgtcgttattctcacccgctacaacgggattgcattcgatgataggttcgccaatgccatgggcttcatgt

SEQ ID NO: 52898 - DNA, 414 bp, Glycine max
  unsure at all n locations
  Clone ID: LIB3167-034-P1-K1-E5
gtggctccgtatgagaagcaatatatgcaggaggttcagcttagagcggcagcagagcanaatgtagatgctaaggaagagcaacctgctgttactggaggaactggaaaggcagaagcaattgggggcaatgtgaagagtaggccttctaattcatcctctactgaacaagacttagatacatttcttcttggagatcttgaagacagtgatgaagctccagatgacggtgagggcagttttgatgatgattttgacaagattggcaattcagatgttgaagatgagaagcatgtgaagaaaactgctgcaacagtttaggattcccccaattacttttggttgagagactgaagtcaaaatgaactttgctgcttgcaactatccctgagatatcagtgaaaccataaagac

SEQ ID NO: 52899 - DNA, 298 bp, Glycine max
  Clone ID: LIB3167-034-P1-K1-E6
ggctatactaaggtgaaaaaggagagacggcagctgctacatctactgctgggttcaacgggtggggatgtcacttccggcgtggaggaaagagaagccatccccttctcgctgctagcattcaagagcaaggggttgcttgtgggaatcctaacaaagctatagtgaccatggctactgcaccaagtcactcgcgtgtccagactgctataacgagtctgtaaagcatagacccagctggcctggatggccaagctccaggggaccgttgaatctacccactgatacgaagaaagga

SEQ ID NO: 52900 - DNA, 457 bp, Glycine max
  Clone ID: LIB3167-034-P1-K1-E7
tttccttttccagggagctcattgacaatggctgtaacaaagtgggtcatgaaggacaaaagatggtctctccatggaatgacagctctagtcacaggaggcacccgaggcatagggcatgccattgttgaagagttagctgagtttggagcaactgttcatatatgtgcacgtaatcaagatgatattgataaatgtttagaagagtggaaaaacaagggacttaatgtgactggttcagtatgtgatttactatgttctgaccaacgtaaaagattaatggaaattgttggctccatctttcatggaaagctcattattctagtgaacaatgctgctacaaatataacaatgaagatttcagtttacacatccttatgatatttcagccataatgtgcacccaatttgagtccgtttaccaattttgtcaagttttatctcccttttatataatt

SEQ ID NO: 52901 - DNA, 466 bp, Glycine max
  Clone ID: LIB3167-034-P1-K1-E8
ccaattcaaccatggttgcgagactcgcggtaacagcgctggtgctgatagctttggcaacaggttctctccaatcttcagcttcagcttcatcagtgggtaaattcgtcgacgaaaccatcacttcccacaagatcgtcattttttccaagacctattgcccgtactgtagaagagcaaaagctgttttcaaagagttgaaccaagttccacatgttgttgagctcgacgagagagaggatggttcaaagattcaggatatcatggttaatattgttgggaggcgtactgtgccacaagttttcatcaatggaaaacaccttggaggctcagatgatactgttgaagcttacgagagcgggcacctgcataaacttctaggaatcgagaaaaaggatcatgatgatcatgatgatctctgaatcaggttgttaattagggtaaactatgtcgcaaagctgcaact

SEQ ID NO: 52902 - DNA, 432 bp, Glycine max
  Clone ID: LIB3167-034-P1-K1-E9
agaagagaacggctacacatgcacaatctctaatgtcactcacgaagcgaacttgtgccactggcaatgcactcaaacgggattctgtctccagacctaatctattgacttctttttctctctccagatgcttatcttccgacgcggatggacctaagcacgctgtttcacatgtatgggtcaagcacgaatgctcagtcgacaccattggtatcactgaccatgcccaggaccatcttggagaggttgggcatgtggagctgccagaaccaggtggcacagtttccacgaagtcttacttccgagccgctgaagtgataagcaacaagtgatataaactctgcaacctcgcaagagatcgttgaggttaacaaaaagctcacagaaacgcctggcctggtcaactgaagcccatacgaagatggatggatg

SEQ ID NO: 52903 - DNA, 393 bp, Glycine max
  Clone ID: LIB3167-034-P1-K1-F1
cccacgcgtccgaagcaaccatggcaatggcaacccaagcctctctcttaaccccacccctctccggtctgaaagccagcgaccgcgcctccgtgccatggaagcaaaactccagcctctccttctccagcccgaagcccctcaagttctccagaacaatcagagcagcagccgccgacgagaccacagaggcaccagcaaaagtagaggctgcaccggtcgggttcaccccaccagaacttgacccaaacaccccttccccgatcttcgggggcagcaccggcgggctcctgcgcaaggcacaggtggaggagtttttatggccattacgtgggactcacccaaagaacagatctttgaaatgcccactggcggcgccgctatcatgaggga

SEQ ID NO: 52904 - DNA, 264 bp, Glycine max
  Clone ID: LIB3167-034-P1-K1-F10
tgttcggattgcgagcgacgtgagcggttctctgccctcgacgttgtgagaagtccactgaacgttatcatttagaggaaggagaagtcatattgtataatttcaacttatgagtgtctttcatcgttctcaaaatcaataaatcacatcttcaattgctttgtttcaatcaataaaaaaatgtccgatcagttttcagaatggagaggaatatcgagaaaaaggctgataaataagctcaacggttgattgcttgttgggctc

SEQ ID NO: 52905 - DNA, 456 bp, Glycine max
  Clone ID: LIB3167-034-P1-K1-F11
gctggatatatcgtatcctaaggctcctagcatgtcactccatcattgactgcacagttgttgctgatcagcatgctcttcctatacatttgcagaggctctatggcatgaacgctgtggccaaatactttgcttccattgatgatggtgctggctcactaggcccttttatgatgttggctcaagacaaggctgcacttcaaacttggtcagtttttcccttcttgtactctactctattgtcaggagagtgagaaattatctatgatatgagactattacatgtctatagttctgttgaatttgcatacatataacacatactagaggtttatttcctcttccctttaaattaaaaaacttgactacgtgtcacctgaagagtgacgaagacaataaacaagtaggctgtggcacatatggtgatctcaaaccatacaatactttttccttgac

SEQ ID NO: 52906 - DNA, 362 bp, Glycine max
  Clone ID: LIB3167-034-P1-K1-F12
cgcgccgtccggttcggtcgacccactcagcagccatttatggggcactacccaccattccatgaattcctgttttcttgggagcaccaaagagcatgggaagcctgaagaaaaataccctgggggctttgatccttggatcttaagccctaaaacattacgatcaagcaagaataaaggcgctgttgtgctttgggactggtcaacatactatccgcactgacttgaactgctgtactgctgcccatggacacacatggacgtatattcacatgattgctgaaaaaaataattgtcaaagctaccgatactcggtaacattgaagatcgcgactgtactgtatgtggctgataacttgatc

SEQ ID NO: 52907 - DNA, 473 bp, Glycine max
  Clone ID: LIB3167-034-P1-K1-F2
cccacgcgtccgcggacgcgtgggtttttcccattgcttctaacgtgagatctcagattgcaagtgcctggtctcttctcccagaatcggtgtaggttacaggtttaagggttttgttttcatttaggtcactaatccgatatcatgaagctcgatacgactagtctcgaatcgtttcccacactgattgcacctcaaaacgacgtcgccggagaactctccgccgctccgttctttgaccttccgaattccaatgacttcgatgggttcttgaaagacgctattcagatggtgaagcccgcgaagggtactacaactcttgcttttatatttaaagagggtgttatggtagctgctgattctcgagcttgcatgggaggatttatatcgtcgcagtctgtgaagaaaattatcgaaatcaatccgtatatgcttgggacaatggctggtggtgcttctgattggccagtttg

SEQ ID NO: 52908 - DNA, 443 bp, Glycine max
  Clone ID: LIB3167-034-P1-K1-F3
agttgagaactaagaaggagaagcaaatggcttcctcaatgatctcttccccagctgttaccactgtcaagcgtgccggtgccggcatggttgctccattcactggcctcaagtccatggctggcttccccaccaggaagaccaacaatgacattacctccattgctagcaacggtggaagagtgcaatgcatgcaggtgtggccaccagttggcaagaagaagtttgagactctttcctacctgccagaccttgatgatgcacaattggcaaaggaagtagaataccttcttaggaagggatggattccttgcttggaattcgagttggagcacggttttcgtgtaccgtgagcacaacaggtcaccaggatactacgatggacgctactggaccatgtggaagctgcctatgtttgtttgcactgatgcttctcaggtgtt

SEQ ID NO: 52909 - DNA, 485 bp, Glycine max
  Clone ID: LIB3167-034-P1-K1-F4
cccacgcgtccgcaattctgaatttgcgggttttgtatttggacttggtcgtcaacacagtctaattaagatctttttgctccttcgcttatgaatcttcttcttcttcttcttcttgttcctgcaacgcactgaattcgatcaatcaatccatcttcaattgctttgtttcgatcggaggaaaatggccgatcagttatcgaagggagaggaattcgagaaaaaggctgagaagaagctcagcggttggggcttgtttggctccaagtatgaagatgccgccgatctcttcgataaagccgccaattgcttcaagctcgccaaatcatgggacaaggctggagcgacatacctgaagttggcaagttgtcatttgaagttggaaagcaagcatgaagctgcacaggcccatgtcgatgctgcacattgctacaaaaagactaatataaacgagtctgtatcttgcttagaccgagctgtaaatc

SEQ ID NO: 52910 - DNA, 467 bp, Glycine max
  Clone ID: LIB3167-034-P1-K1-F5
cccacgcgtccggtggaacaaccttgtaagtttgtaacaatggcttcctcagttacttcctcttttcgcatcagcaatttgaagtcggtttttgttggtgagactaataaactcagagtttcaagtgttcctggtgcccatgttggtttcaatagaaagactgtagaatgtaaggaatcacgaattgggaagcaacctattcctgtgccatccaatgtcacggtcaaattggaaggacaggatatacatgtgaaaggtcctttgggagaacttgcattaacttatcctcgagaagtgttggttgagagggaagagtcagggactctaagggttaaaaaggcagttgaaaccagaagggccaatcaaatgcatgggctttttaggacacttacagtcaacctggtgattggagtatctaaagtgtttgacaagaaacttcaacttgttggtgtaggttttcgtgctat

SEQ ID NO: 52911 - DNA, 491 bp, Glycine max
  unsure at all n locations
  Clone ID: LIB3167-034-P1-K1-F6
cccacgcgtccgcaccatcagtgacaatgagccttctgtcactaaaaaccttagccctcagtgctccatggtagtcgacaagcttgaaactggggagcaggtcactcagaaggtgaacattcctgtggacaagaaaaggagaactagaaatggttcttccttcaccagtaacccccaatccaaggatactgcaacagaagggaaaaacaagaaacaaaggaagaacaatggtgggttgaaagaagaggacaaggcaaaagaagagaagaaggatcagagaaagtgtcctgaagagcccccaacaggctatatccacgtcagagcaagaaggggtcaggcaacggatagccacagccttgctgaaagggtgagaagagagaagataagtgaaaggatgaaggtgttgcaacggcttgtgccaggctgtgataaggtgactggaaaggccctnatgttggatgaaataatcaattatgttcagtctttacaga

SEQ ID NO: 52912 - DNA, 434 bp, Glycine max
  Clone ID: LIB3167-034-P1-K1-F7
gttgatcgagataactagaaacagtgtgatgaaaatgaaggtccttgttttcttcggtgctacaattttggtagcatgggaatgccatgcgtacgatatgttccctctccgaatgaacactggctatggtgcccgtactccggaggtgaaatgcgcaagttggaggcttgctgtggaagcacacaacatctttggctttgagaccattcctgaagagtgcgttgaagcaacaaaggaatacatccatggcgaacaatatagatcagactccaaaacagttaaccaacaagcttacttttatgccagagacctcgaagtccatcccaaggacacatttgtgttcagtatagatggcaccgtactctctaatattccatactacaaaaaacatggatatggggtggagaaatttaactcgaccttgtatgatgaat

SEQ ID NO: 52913 - DNA, 92 bp, Glycine max
  Clone ID: LIB3167-034-P1-K1-F8
aaaaaaaaaaaaaaaaaaaaaaaaaaaaaaaaaaaaaaaaaaaaaaaaaaaaaaaaaaaaaaaaaggaaaaaaaaaaaaaaaaaaaaaaaaa

SEQ ID NO: 52914 - DNA, 412 bp, Glycine max
  Clone ID: LIB3167-034-P1-K1-F9
cccacgcgtccgcccacgcgtccgggttcatacactttgaagatgaagatgttcgatggaaacaagcatgagttaacctgcattacatttggttttgatattgggtttggttcctctgtggctgatagctaattgaaattggtcatcgaaatctatgatcagaaacagatctatataaattacttgtacaaactgcaaagtacccttatgttaccagatcctgaattaagaatcagaaagatgtcttgtattttctgggatttaaaacacaaactatgtgtttctttatttatttttctatattcttactacactcagaaggtagatcaacattgtgcaatgtttatacacatattttgactgtggtatgagggtattatcgtgatgtaatgatatattcctccttgcatat

SEQ ID NO: 52915 - DNA, 415 bp, Glycine max
  unsure at all n locations
  Clone ID: LIB3167-034-P1-K1-G1
gaaaactataagtatatttgcaatgggcaatgtcattgtcatgcagattgcactaagatggatatatgagcaaggggcaattgcaattgtgaaaagcttcaacaaggagaggatgaaacaaaaccttgacatatttgactgggaactgagccaagaggaatcacagaaattcagccagattccgcagcgtaagatgtatcgcggaataacttttgtatcagaaaatgggccttacaagaccttggaagagctttgggattgagattcctgaaatcattcctaatagcagcaaaatgtcatataaggctgtgtttggtttaagatgggaggagggaactaggagagaaattttgtacttttcatgtggaactcacatcttttacactntaataaaacaaaaaaaatcttctatttc

SEQ ID NO: 52916 - DNA, 287 bp, Glycine max
  Clone ID: LIB3167-034-P1-K1-G10
gcacgctcgcaaactagctggtatcggcgaagacattatagcctggaattttggagggccaaaaaactggtttaattatggctatcaacgatcatggcgcaacattaggttctgctgtgatggtcaagggtcctgaggacagaaatgttgaagggaagtgaccaaaacttgaagaatctggcattgtaatgatctattgctggtgcaagatcgatcttctacaaggaaatgctttttttcggggagagggatcaggagacagtgtcatcaaggtgtttgtgctggtg

SEQ ID NO: 52917 - DNA, 304 bp, Glycine max
  Clone ID: LIB3167-034-P1-K1-G11
cccacgcgtccgcccacgcgttcgtccacgcgtgttgttttttaggctgtttcagagagagctgaaaagcagccagcagttttgtagggatagaagggatatttggttagggggtagaaggtgatagggtttactatattggaaggcgtatgttttgtccaattattactactcccaaggtcgatgggcaaagaaaataagtccctttttgtttgtcttctgattcgatttagaacatgagagacagagacatgagttcttccccattatgtcatttggtttaatcacattttttttcattgac

SEQ ID NO: 52918 - DNA, 443 bp, Glycine max
  Clone ID: LIB3167-034-P1-K1-G12
gaacaagtagttgagaactaagaaggagaagcaaatggcttcctcaatgatctcttgcccaggtgttaccactgtcaaccgtgccggtgccgacatggttgctccattcactggcctcaagtccatggctggcttccccaccaggaagaccaacattgacattacctccattgctagcaacggtggaagagtgcaatgcatgcatgtgtggccaccagttggcaagaagaagtttgagactctttgctacctgccagaccttgatgatgcacaattggcaaaggaagtagaatacctccttaggaagggatggatcccttgcttggaatccgagttggagcacggtttcgtgtaccgtgagcacatcaggtcaccaggatactacgatggacgctactggaccatgtggaagctgcctatgtttgggtgcactgatgcttctc

SEQ ID NO: 52919 - DNA, 478 bp, Glycine max
  unsure at all n locations
  Clone ID: LIB3167-034-P1-K1-G2
cgaagaagccctaactacgcacgcattcgtgagaaaactcaatattcgtcgctcatggcactgtgttctcgtctcttttccaaatccaaattgatctatggcagtcaaatacttctacaaaaggagcatgctattccagttcgtcactttgctaaagagtctgcccctcctgcccttaagggagacgagatgctgaagaacatttttgtggaggtgaagaacaaatttgagaccgccataggaatattaaagaaggagaaaatcaccattgacccagaagatccagctgctgtttctcattatgcaaaggtcatgaaaacaattagagagaaggcaagcttattgtcggagtcccaagacatactatccaccattgaaattgagacacaggatattccagatgctcggacctatcttctgaccttgaaggaaataagagtcaagagaggtcttacagatgatctnggtgcggaggctc

SEQ ID NO: 52920 - DNA, 427 bp, Glycine max
  unsure at all n locations
  Clone ID: LIB3167-034-P1-K1-G3
ctatcatgctttaagatttaagccacatatcgtgaagttaagtcaatcaatagttgaaaagctgcgcgaacaaggtcccttcatgtccatacatcttcggtttgagatggacatgttgtcatttgctggatgcttcgatatatttacacctgaggagcaaaagattttgaagaagtaccgaaaagaaaattttgcacctaaaagacttgtctataatgaaagaagggctattgggaaatgcccgttgactcctcaggaggttggtcttattttgcgtgcattgngttttgacaattctaccaggatatatcttgcagctggtgaattgttcggccgggatcgatttatgaaaccatttcgaagtttgttccctcgactcgagaatcattcttctagtgaaaactctgaagagctngctgaaaacact

SEQ ID NO: 52921 - DNA, 441 bp, Glycine max
  Clone ID: LIB3167-034-P1-K1-G4
cccacgcgtccgatcaaaggccgcccctgcaaggttgtggaagtttcgacttccaaaactggaaagcacggtcacgctaagtgtcactttgttggaattgatattttcactgccaagaaacttgaggatattgtgccctcttctcacaactgcgatgttcctcatgtgaatcgtactgattaccagctcattgatattgctgaggatggatttttgagtctgcttactgaaaatggtaacactaaggatgacctcaagcttcccactgatgagagtctgctcactcaggatggatttgctgagggcaaggatcttgttgagtctgtcatgtctgctatgggtgaggaacagatttgtgccctcaaggattttgggccaaagaactagcttttggtgcttgtcgcttggtatttctatttcctatttaagcaaagatatttt

SEQ ID NO: 52922 - DNA, 258 bp, Glycine max
  unsure at all n locations
  Clone ID: LIB3167-034-P1-K1-G5
cacaaacaaaactttntttatcaattttatggatctatgcaaaacgatgcatagtcagccataccatgtcacgtcttccttgcttcctaaattgaaaactaacggctccctggatggacttcagagatagactatcaagactaggttggcaccatacaactttaaagtaattctgcgactatatatcaattaatacattatttccctagcttgcaacagtccgaatactattcttacatatgagtaatctcttttttt

SEQ ID NO: 52923 - DNA, 453 bp, Glycine max
  Clone ID: LIB3167-034-P1-K1-G7
gttacgcgttgtaactcgttcttcttctttagttgttcgtagtgtattcgcgtcatgatcgtcatcacacctgtaaaagaggagaagctgtggtaactgtacatgaggcagctgctgcaagtgctggaccgactgcggatgctgcaagatgtacccatacttgacctacactgaagcatccaccacggagtccatagccatgggagcgacacccagtaagacttaatcagagtgggctgaaatgggtgtgcccgctgagaacgatggctgcaaatgtggaccaaactgctcctgcaacccctgcacttgcaagtgaggtgttgggagagcaagcttcaagcagagatagcccttaattaggaataatgataaactattaatgtgtagctaaaaacttatgtattatgtctgggataggtttcaggcactctggtgttttgtgttaaacaaaca

SEQ ID NO: 52924 - DNA, 408 bp, Glycine max
  unsure at all n locations
  Clone ID: LIB3167-034-P1-K1-G8
caaaagtagtcttcagtccttcccttgaattctaaacctatggtctctgtttttacgtttttgttttctcttccttgtgtgcccccactgccccagtgccttgcaatctatgatgactctatgctacctttttccttcttactaggagaaatctatgtaatatcgccttcataatgttgtatattattattgttgtacttgctcctcatcaatgtcccaacttcttctagtctgnaaaaaaaaaaaaaaaaaaaaaaaaaaaaaaaaaaaaaaaaaaaaaaaaaaaaaaaaaaaaaaaaaaaaaagggagggcgggataagaggaccaaagaataaaaaaaattaatggggggggccgttttaggggtccaaagtttccttccgggggtttgcaaggtaataattttt

SEQ ID NO: 52925 - DNA, 410 bp, Glycine max
  Clone ID: LIB3167-034-P1-K1-G9
gttggccccaaggaaggagacactccagacagagcaaaatacagccaaggaattaagttctttgagccagagataaaaggtgactcaccagaaaaggtagagtacataggaatgagaaatttgatcaaggccgtgaaggacaatcttggacttcgaagaggaaagctattatttggatttgaaggcaataattacaggcagcttccttggggtgctttagatgatgtggtgatgggtggagttagtgaaagtacatttcaaattgacccaagtgggggtgaaaatggtggaccaactgggatttttaaaggtgttgtttctacagcaaacaatggtggctttacaagtatcagaactaagaatttctcagaacctgataatctttctgcatatgattggttgtagttccg

SEQ ID NO: 52926 - DNA, 475 bp, Glycine max
  Clone ID: LIB3167-034-P1-K1-H1
tactaatatatcttaacagagtgcttgctcaaagtggtctttcactgaaagatcaacttcctggtagtgatgttacaattgcagaggctttgatggccccaactgttatctatgttaaacaggtacttgacttaattagcaagggaggggtgaaaggaattgcccacatcaccggtggtggtttcacagataacataccccgagtttttccggaagacctcggagctgtgatatatgatgggtcatgggaagtgcctgcaatgtttaagtggcttcaggagggctggaagattgaagactctgagatgagacggacttttaatatgggcatagggatgatcctggtagttggtccagaggcagctaatagaatactcgagaacagaggtgaaacagagaaattctaccgcattggtgaaattataagcggcaagggagtgacctttaactaaattaactgaatttatcatgttgt

SEQ ID NO: 52927 - DNA, 118 bp, Glycine max
  Clone ID: LIB3167-034-P1-K1-H10
gcggagcctttcaagccccaaggttttcttcaacgcatgaccctcaccagctcacacggtcgcctgagaaggcgcatgtccactcatccaatggatacaactcggtagtgtcatgatt

SEQ ID NO: 52928 - DNA, 234 bp, Glycine max
  Clone ID: LIB3167-034-P1-K1-H12
agctctctggaggctgatgagagacacactcataccgtgggaaaaacggatgctgctggccatgttgcttaatttagttcttgcttcctttgtcttctcgagttttatcagagacgggagtgcagggatcactagctctttcattcggtcagagtggccggcagttgacatcccccttgatcatgaatcatttgcagttccaaaagggttataatgcacctcaacaagtgcaca

SEQ ID NO: 52929 - DNA, 313 bp, Glycine max
  Clone ID: LIB3167-034-P1-K1-H3
acctccactttttatatatatcccctaattgtgaggaattctcttttcacattctctttgtagcccaaatttccagaattgagtttaaaaaaaaaaaaaccaaaccccaccccctcatcataaacaaaaaaataacttaatggcccccccctctttaggttccaaacttacctacccttgcatgcaacatcataacttcttctataatttcacccaaaattcccccccctttccaaaatcccacaacccctccccctggaaacccctgtcatttccccaacttaatccccctacatcacatcccccccccccc

SEQ ID NO: 52930 - DNA, 485 bp, Glycine max
  Clone ID: LIB3167-034-P1-K1-H4
ggattagatccaggtccaaagttggaagtgctttgttttgaaggagaagcttaagctcaaggagtggcatgaggaggtttatgggaatttatcctttgagataaggactgtggtagatgagttagatgacgtggaggtaagactttgtgaagagcaaccagttgattgtgatcagaggaaacttctatcctctgagttttggaggtgtgcctgaattagggagagtatgctggcccaaaaatccagggctaagtggatcaaagagggtaataccatctcacattttttccatgcttccttgaaggacaggtacataaagaattatctagtgaggctacatactgagaacgggggtgaggtaaaggatgttgttgttcatcactttcagaggattttcatggaacctaacttggagcgtcccttcttatcaggtattcagtctaatcaggtgtcatcttgtgattgtgtttctctaactgttttga

SEQ ID NO: 52931 - DNA, 207 bp, Glycine max
  Clone ID: LIB3167-034-P1-K1-H5
accgactcgtccagacattagatccaactccaaagccccaagtgctttgtttacgaatttccatcttaagctcacagagacgcttagagaatcttagtagcacattatcctttgtcgcaactaacttttgtttcgttcaatcggtcattgagcttccttccaaatccagcagctccaaactacacttcttagaattatgacttaacc

SEQ ID NO: 52932 - DNA, 294 bp, Glycine max
  Clone ID: LIB3167-034-P1-K1-H6
ctacagagcaacgaggacggaaggaatggaaagaggaccggcggcgctttggggaaggaggtattgttgctccgatcgcattgtaacaacctcggagaggaacataaagctgccgtcttgttgatgtcgctctcttatgagatccgtttatgcctgaactgaaccagaattaatcaattattattattattctaggtctagatgaacaattattgaggtgaattccagattctgttttaggatgttccttcgcctaaccctttccccaaagtacatgcttagtttttctctttt

SEQ ID NO: 52933 - DNA, 457 bp, Glycine max
  unsure at all n locations
  Clone ID: LIB3167-034-P1-K1-H7
aagaaagctattgtcattgatttgctagctccaacaatgggttctagcagattatcattcattttagtacttgtgcttgtaaccttttcatccatgatcattgactcaagggttgcagaggcacgtaccctgccaaaatcagccttattgccttccaaagttgatatacctactgttgttcctcttccactggtggcaccactgccaaatttgcctgttactctccctccagtgcctgaactacctgcagtacctaaagtaccaattcctgaagtaatagttaataacgccaaaataatcccttgagtacctatgatctatccagtcactactacttattttgtcacttgctaaattaactngttgttgccatcccagggtggttctggttctgttgaggtttaatttctgtcattcaattacatgctatgttcaagttatatgtagcttcagtcag

SEQ ID NO: 52934 - DNA, 360 bp, Glycine max
  unsure at all n locations
  Clone ID: LIB3167-034-P1-K1-H9
cccacgcgtccggtgcaagagttcaagcttgttggagatgcacctgcatagtctagtgcttaattaggttgctgaagagtgaagaatgagacagcctggttcgaaggggaaaagcctaaggatatatcaaaggatcctatatgtataaaataaatgttgcttttttaccttcggtattgatatctgaagtctaatttgacatcctatatatgaatatatgatctatgtgtttctttctctccctacctctctctcttttaaagattcaaatttggttttactttttagccattgtaagtgtattaacatcaatacttaaatctatatctatatctacattataatctatatctatnttnt

SEQ ID NO: 52935 - DNA, 400 bp, Glycine max
  Clone ID: LIB3167-035-P1-K1-A1
gcacaacaggtcacctggatactatgatggacgctactggaccatgtggaagctgcctatgtttggctgcactgatgcttctcaggtgttgaaggagcttcaagaggctaagactgcataccccaatggcttcatccgtatcattggatttgacaacgttcgccaagtgcagtgcatcagcttcatcgcctacaagcccccaggcttctaagtcattgaaaaatttgcaaagcatctgtagccaccccactttgtttgttgtacttaaactacattcccatttgtttttgctttatgagatttcatcatcctgtatttttggtttctgttttcggacttcaatggaaattaatggatgagaactaatgaataaactattgtgttgtgttgctttgtttcc

SEQ ID NO: 52936 - DNA, 343 bp, Glycine max
  Clone ID: LIB3167-035-P1-K1-A10
gttgcatcaccgcaagtccacaacatgtctgccactgccgctgcaggcatagcttggttgttttcttcttctattaacagtgtcaaatgtcttcgttcctccaagaactgctccattatagacccccttataaccacagtgccctcaaaccgtggcatgtttgtgtcacacttggtggaacctttgtccattgggggtgccattaattcgcacaagttgtgggggcctagaatttctgctgctgttgcacaagaagaggctgttgttgtggctgatgatgaagtagatgatggtgctggtttagttgaagaagagaaagtggaggagaatgaaggagaagtag

SEQ ID NO: 52937 - DNA, 360 bp, Glycine max
  Clone ID: LIB3167-035-P1-K1-A11
ggaatttcgaataaagggaaagagggtgcaaagtgcatcttctttttgttggtgtgtcaaactttaacaatctgataaataaataatcagaacgaagaagaagaagaattgaattcgaaaaatcgtagcgtagcgttggttgcgattgaaacggtacgatgggaagaggaaaattcaagagcaagcccaccggtcgccgccagttctccaccccggaagatatgcttgctggaacctctaaccgtcctcgaacttttagacagaaagaagctgagcatgaaaaggagcctgaagaagtatctggggatgaatctggagaagaatcagaagaggaaacttctaagaaaaaaagaacacaag

SEQ ID NO: 52938 - DNA, 418 bp, Glycine max
  Clone ID: LIB3167-035-P1-K1-A12
ctttttctcaacaaaaaggggttcaattctagctagttctattacgtcgtccgcggccatgaacatggcgatcgcgcttctgttcatggttttcgcagtttcatcagctttagacatgtcaataatatcacacgacaacgctcatgcggatagggccacgaggcgcaccgacgaggaggtgatgtcaatgttcgaggagtggctggtgaaacacgacaaggtgtacaacgcgctcggtgagaaggagaagaggtttcaaatcttcaagcacaatctgcgcattatcgatgaacgaaactctctgaaccgaacctacaagttgggactcaacgtgttcgctgatctcaccaatgcggagtacagagccatgtacctgcgaaccttggacgagggtccgaggttgggctttgatacgccg

SEQ ID NO: 52939 - DNA, 383 bp, Glycine max
  Clone ID: LIB3167-035-P1-K1-A2
acaaaatagaacgtaaaaattagaaaaactcttgtacttggtttcatgccagattagggaactcttttagttgtcaattagatcacagagacatggaggttgctatggaactggaagatgatcttttttttgctgatttgtgcaaggaaattgctctactaattatggatgaagatgaagatcctcttgcttcttgtcctcctgactctcttcaggctttttctggggcaattcatgctgctacacagattgctttgatctatgagcatgctttgagaagagaaagcaaagggacaggtgtgtttattcctcaagcaacacagccaagaaggaagcagaggaaaggaagggctaataataattcatatgcaaaacatcaaaag

SEQ ID NO: 52940 - DNA, 182 bp, Glycine max
  Clone ID: LIB3167-035-P1-K1-A3
ggatacccggggggggcgagcgacaaaatataaagttataattagaatttcttttgtacttggccacataccacaatggggtgggtcttttaaacatacagtcggtcacacaaacaatgaagttgctatcaaactgcatcatgatctctgctttgctgatttgagcaaggaaatggcactac

SEQ ID NO: 52941 - DNA, 360 bp, Glycine max
  Clone ID: LIB3167-035-P1-K1-A4
gcgtgaatactgaaagtttaaagcttgactgtttttgacgtcatgtagggaatgacagacaggtgaacttgcatactcttgggtaaactgaactacatgatgtcaaactcaaggagcactctactcaaggtagctcagagggaagcatccattgtgattaactgagatatcaaagcattttgccaatctatgttgcatacgaagccattgagatagctataacagtaaactgtatatagtcatacgaaaggatggttggctctttttttctatccctaggaaacaatcatcattcgattttggccttatcaaacatgtgtgtaccatatattttatatagttggacaataaacaattggg

SEQ ID NO: 52942 - DNA, 113 bp, Glycine max
  Clone ID: LIB3167-035-P1-K1-A5
aaaacgggtccgcccaccccgtccgaaaaaaaaaaaaaaaaaaaaaaaaaatttttataaaaaaaaaaagggcgaccaatctgggggttccaatctaacggccgcgggcatac

SEQ ID NO: 52943 - DNA, 414 bp, Glycine max
  Clone ID: LIB3167-035-P1-K1-A6
tcggctttttttttctttaacattttcaattcaacaacatcaaggttctgatcatgtcggggaagaggccccggccaatgatcggaaagttgtcggagttgttggtctcgagaggccgcacggtggcacttttggacaccactggaagcccaagaggcccattagacatgaagatgatgcaatcaccaagaggcttaaaaaattatgatcttggtggcgttggtcttggaattgtggtggctcttgataaatccaataacgaggttgctgcacgtgaagttttgcccaaacacaccgtttgcaccttcaatttgaaccggtccggcccaattccggttcactacaccaaaaacccagatgaatttgatgtcgaggaatacacctatgtgacatgccgcgtacctaacaaaacgt

SEQ ID NO: 52944 - DNA, 233 bp, Glycine max
  Clone ID: LIB3167-035-P1-K1-A7
cacaaaatacaaacgttcaaattaaaaaatctcttctactagaccaaatgcaaaactgggtagggtcggctgcactgatgctcctcacaaaaaaaaagagctttaagaggctaaaactgcatacaccaataacttcatccccttcattggatttgacaacactcgcccagtgctgcgcatcaacttctttttctacaagcccccaagcttctataacatcgcaaaatttgcaa

SEQ ID NO: 52945 - DNA, 414 bp, Glycine max
  Clone ID: LIB3167-035-P1-K1-A8
cccacgcgtccgcccacgcgtccgatcagagattacctttaagtgtggcacgaccaatgatgaagaaacaaaaggagagggagcagaaaatgcttcaagagcgtttgattcttggacaatttgggggaaaacttggtggtagcagtaaaagatctgctgggaagcacaagccagagaacaggggtctgaaatcaagtgaaggtcattttagaaatggcatactcaatgtgaagcatttgttaaattcagcaccatcaagagatcgtgaaactggaactaatatgtccaatgcatggaaagggaaaggtggtaagaagaaaaatagtaacaagggtggtggtaagaagcaccgttgagcacgtccttgtgaataacgtgttttaggaatattcaggagtcattttttaatatgta

SEQ ID NO: 52946 - DNA, 412 bp, Glycine max
  Clone ID: LIB3167-035-P1-K1-A9
caatgagactgcaactggggtcaccaatgacttggccaaagtgagacaaatgctgggttcctaccagcatccagccctccttattgttgatggagtgtcttccatttgtgctcttgatttccgcatggatgaatggggagttgatgtggcaataactggctcccagaaggccctttcccttcccactgggataggtattgtggttgcaggccctaaagctattgaggcctcaaaacatgctaaatcacttagagttttctttgactggaaagactacctcaaattctaccagctaggaacctattggccatacactccttccatacatttgctgtatggtctgagagctgctcttgatctgatttttgaggaaggactcgaaaatgtgatcgcaaggcacagtcgtttaagc

SEQ ID NO: 52947 - DNA, 416 bp, Glycine max
  Clone ID: LIB3167-035-P1-K1-B1
cccacgcgtccgcccacgcgtccggataaatggagctctgccacagactctaaaatgcagggataaccatgatgggcttacatggatgtactctcaaactcgcttcagttcccaattgctcttctgcaacttttcttttacaaaactccaaccctgcgtttttagaaatctgcattgacacgccccatcagagctctatcttgctgcgccctcgtgcaaacatctactaccaaggccactgaagaccaaggtgtgaagcctcaatggaaggccacgatagacttcatgtggataaaggataacaagaagctgatgctgccaacttaaagaaccgcaactctgatgctgatttgaacctcgtgctccacctttatgacaaaatgttcactcttcagaaggaaagtgagagggttcgt

SEQ ID NO: 52948 - DNA, 413 bp, Glycine max
  Clone ID: LIB3167-035-P1-K1-B10
cccaattgaacttgcctttttctgatgcacttggaaccttaaccttaggtctggtggccttctatgtctctgtgcttattgctattgctgttgcgactaatgaacaaggggttgcttcttccctaatgatttcaaaggaagagaattgtcaatattcaattattcattggcttctctgaaatggacagagatttcatgggtctcaacttgaaagaaccactagctgtggcgacggaggagatgaacaatgatggctgcacaaactatggcttcaaaaaacgtcggattgcacagcgcccattctcgaacaaagtatctgcccttccacatttgatgtctatcaaggcttctcacgatggtaagactaataatacaatggatgataccctatcatcggctgggtatatgtatat

SEQ ID NO: 52949 - DNA, 416 bp, Glycine max
  Clone ID: LIB3167-035-P1-K1-B11
cggacgcgtggggcctcagttgcatcgaagagagagagagcgagagagagagggggaatggcagcacttggtggcaatcgtgatgtggcaggaagccagaacagccttgagatcgatggtttagctcgctttgctgttgaagaacacaacaaaaaacagaatgcccttttggagtttgaaaaggtagtaagtgcaaaacagcaagtggtttctggtaccttgtacaccatcactttggaggcaaaagatggtgggcaaaagaaggtttatgaagccaaagtttgggagaaggcatggttgaacttcaaggaggtgcaagagttcaagcttgttggagatgcacctgcatagtctagtgcttaattaggttgcagaagagtgaagagtgagacagcctggctcgaaggggaaagcct

SEQ ID NO: 52950 - DNA, 389 bp, Glycine max
  Clone ID: LIB3167-035-P1-K1-B12
cccacgcgtccggtgagcacaacaggtcaccaggatactacgatggacgctactggaccatgtggaagctgcctatgtttggttgcactgatgcttctcaggtgttgaaggagcttcaagaggctaagactgcataccccaacggcttcatccgtatcatcggattcgacaacgttcgccaagtgcagtgcatcagcttcatcgcctacaagcccccaggcttctaagtgtgaaaaatttgcaaagcatttgtagccgccaccccactttgtttgtttgtacttaaactacattcccatttgtttttgctttttgagatttcatcatcctgtatttttggtttctgttttcggacttcaatggaaattaatggatgagaactaatgaat

SEQ ID NO: 52951 - DNA, 329 bp, Glycine max
  Clone ID: LIB3167-035-P1-K1-B2
aaaagacttcgttttaatattatttatttttaaattaactttagtcacaagtcttgggttaagataaatgttgttgtaaaattagttccggatgctctaaacttaattttgaataaactatctgaagatattttagattcccttttaaaaaatacctaattcttctttgggaaagttggagaagcaacaacacctatctttctatactgaagtagtctcggacttcgtgttgctgcaagtttatcggaaaaacaatcacacgctaaacaagcacttagtaattagttggattagcaattctaactccctgctaacaatggcttaattct

SEQ ID NO: 52952 - DNA, 339 bp, Glycine max
  Clone ID: LIB3167-035-P1-K1-B3
cccacgcgtccgctagatcgcgagcggcgccctttttttttttttttttttttttgggggggactgaatatatattattattattattattattattattattattattattattattattattattattatgtgagagagagacggtttttaagaaaattattgtttgttacaatattcctgtgatgttgctatgtataggtaatgctgtctcaatgttagaattaaaaggaatttgaatgattcaagaattttgtatttgggtacaaaaaataaaaaaaatggtggttggggagttgtaaatttatgtttacaatttttttaattttaaatctattt

SEQ ID NO: 52953 - DNA, 411 bp, Glycine max
  Clone ID: LIB3167-035-P1-K1-B4
agcagtgctattgttggctatgtgtgtgcttccggccatggttgtggccattcgcccagcaaagaaccctttttgcgtgaagggtcgcgtctactgtgacccttgccgtgctggttttgagacctcagcaaccacctacattgccggtgctgagattatgttgcaatgcaagagcagggttagcaacgaggttgtgtacaccaagaaggggtacactgactcaactggagcatacacaatgtacgtggacgaggatcacgcagatcaaatatgcagtgccaagcttgtaagcagccctcaccctcaatgcaaggaagtcaccccgggccgtgacgaagccgtcgttattctcacccgctacaacggcattgcatccgatgataggttcgccaatgccatgggcttcatgtc

SEQ ID NO: 52954 - DNA, 417 bp, Glycine max
  Clone ID: LIB3167-035-P1-K1-B5
cccacgcgtccgcagctcttatcttaagatggcaaccttgatcggttgccaatactgctatctcttgttccttctttggtttatctctagcttaaccttcttattgtttttggactatcatgttatgtttctacgtgtgaaaatactactatttggtaacattcactcctttgacgttaatagaccagtgtcttcatcgctggctcgttgctgggaccagttcagcccagtaatccctcttggcctttatgcagacttgcaaacaacacaaatgcttgctcttgcttttcattcctagttgggggcatatgataccaaaggttgataatgtactggatgttgctcgtggaaactgataagcatttatgaagaaattatagtctatgatgcgtttggatttctgtaatcttttttttt

SEQ ID NO: 52955 - DNA, 404 bp, Glycine max
  unsure at all n locations
  Clone ID: LIB3167-035-P1-K1-B6
acccttccgccaacccttccgaccacatgtaaacgacaccttaccccgtttaagcctaaccgttgggggacaaaaaggatgttgggtgcaccgttgcacctaactgtcctgaaaccctcgtcaccatgtcaaggcttcttgcttgtggaaacattagaaggtttacccgttctgttcacaagacaggctgcttggaagtattttatccaatggggtccccttactcaagatacaattttttctcgcactatagacatgtacaccaagaacaatttctattcatgttatttaaatcaaaggttaactgtttaatgagtagcanggctaggaacttgtataccctncctgcaaataatgtaaaataccatcatggtcaagttgtttggaacaggatgtgtttccat

SEQ ID NO: 52956 - DNA, 377 bp, Glycine max
  Clone ID: LIB3167-035-P1-K1-B7
gcgagtggagaagagaatcgtgatgggaggaggacacggtcacggcaccaggtacggaggagttaccgttcatcacccaaagcgctggcacactatcaccggcaagggtttgtgcgcggtcatgtggttttgggtattctacagggcaaagcaagacggtcctgttgtattgggctggaggcatccttgggagggtcatcacgatgatcatggcaagggccattaagcattccttaggcatgagctccaagaacaggaagaacagaatttgaagtgtctgttgctgtgggtgtgctgttagttgaaatgttactatgatcaattcaataaatttggcttgtaaataagagattttcttttgcggggtttcatgagca

SEQ ID NO: 52957 - DNA, 453 bp, Glycine max
  unsure at all n locations
  Clone ID: LIB3167-035-P1-K1-B8
cggaaccggaaggggccggcgtcgagcccaccgcgtcacgcactaaattatacaacatagggcctattgggatactaaacccctataataccacaattccggtgtggcatataacacccaagttggctaaatcattcaacgttttccttgttttctggattctaaagaaacatgcaaaaattcagcaacattctatgttggtgtttgaaaaanagattcatatttttatgcaaaagttttgttcctttacgatttcagcatcagtggctacagcctgcatgcttcacggtgcaagcagccggcccgcaaccgcccgcaaatactctggcctttccggaaccgtccgcattcccggcgacaagtcgatctcccaccggtccttcatgttcggcggactcgcgagcggtgaaacgcgcatcaccggccttctggaaggcgaggacgtcatcaata

SEQ ID NO: 52958 - DNA, 290 bp, Glycine max
  Clone ID: LIB3167-035-P1-K1-B9
gccgatatttaaactggacaaagtagttaggtttgattcagtttacatccaggatgtgtggtgctcgcaaggtggtgacgcttccactttcaactttttcccatctaaaaaactaataattccagcaccttctatttatgtctataaaaaagaatcaattattatgcaaaagttaagttcctttaccatttcagcatcaatgactacaacctacatgcttcacattgcaagcatcctttccttaacctccctcatattctctctcctttacttaaccatccttattcccg

SEQ ID NO: 52959 - DNA, 96 bp, Glycine max
  Clone ID: LIB3167-035-P1-K1-C1
cccacgcgtccgatcagaaactcaaacatcaaagaaaaggaaaatggttgagaaaacagttgtggcagtgagggtaggagagaaggttggcaagct

SEQ ID NO: 52960 - DNA, 413 bp, Glycine max
  Clone ID: LIB3167-035-P1-K1-C10
cccacgcgtccgcgctcttgtccttttttcacgcttaagatcacccaagagaggtgctaagacacacaacacggcgcgacagagagagtttgaggaagaaatcatcatggcttcagcagcatctgggtttgtgctgtctcttaatgttgcagcttccaccacaaactcaagggtggtcttgttcaacacaaagaaccacgcttctaggcttcttgtgagggcttcagacgagcctgcagcggcggcacccgcaaccaccacccctccagctgaagctgaagcaaagccaaaaccaccacctattggccccaagagaggtgctaaagtgaagattcttaagaaggaatcctactggtacaaaggcactggttcagtggttgctgttgatcaggaccccaacactcgctaccctg

SEQ ID NO: 52961 - DNA, 141 bp, Glycine max
  Clone ID: LIB3167-035-P1-K1-C11
cccacgcgtccgcaaaaactacatcttggtcaataacttatgtgtggcttttgacgagctagcatgttttacctagctctcttcattcaattttcacttgtaattattactagactaaatgttacctttttaatgattcac

SEQ ID NO: 52962 - DNA, 340 bp, Glycine max
  Clone ID: LIB3167-035-P1-K1-C12
aataacacttaaaacgcaaagatggtttagatgcactaaaacatatacaaatggaagttttaataacggacagacgctaaataaatgtacaataataaacgcactcgaaactggtcttataaacaccacatacccattacacacccactctatataatataatgaagtggatgaaacgacatttgtaaactgagaatgtgacaattgggcatctgatgattgtatgctgaccttactaaggtcatgttacttgtgtaaacatgcaacgacatgtataggtcatattgaacacagatcatggaacacacacaaatttcttacaaactatgggaacctatca

SEQ ID NO: 52963 - DNA, 135 bp, Glycine max
  unsure at all n locations
  Clone ID: LIB3167-035-P1-K1-C2
ggttttattgnnaatcggnnattgattggtttaaaatatttcactttttttcgaaaatttttggttgttacgacccttttcacgaatttggaggtaagaacgaaagtttacgctttttttttaatttttaaattt

SEQ ID NO: 52964 - DNA, 409 bp, Glycine max
  Clone ID: LIB3167-035-P1-K1-C3
gggaaaaagcgcttctgggacgcgtttcctttagggacatgtattccgcgctcaacgctgtttctggtcactacattagcttcggaccaaccgctcccattcccgccaaacgaagggcaaggatcttggaggaggtcgacactgctgaaaaggcgcttctaaggggaagataattgagcaaaaagaaaggttttattgacgaaggcttcaaatgtggaagtcgttattccttcaaattgtagacgttcttgataatcatgatctgtattttcaaatgagatctgatgcaactagtagaatgagtctttcaccattgaagaagtgtactgtagcaattcgtatactggcatatggatcacctgttgatagtgtcgagtgtatgttatatttcaaacattgaagtatctcg

SEQ ID NO: 52965 - DNA, 412 bp, Glycine max
  Clone ID: LIB3167-035-P1-K1-C4
gactttcactagccgcagcaccctcaggaggagaataaggatgtctcacaggaagggcgagcacccaaggcacgggtcactgggatttctccccaggaagcgtgctgctcgtcacaggggaaaagtgaaggcattccccaaggatgacccatccaaggcacccaagctcactgcattcttgggttacaaggctggtatgactcacattgttagagaggtcgagaagccaggatcaaagcttcacaagaaggaaacatgtgagcctgttacaattattgagacccctccaatggttattgttggtgttgtgggttatgtgaaaactccccgtggtctccgaacattgaacactgtatgggctcagcacttgagtgaggaactgaaacgtatgttttataagaactggtgcaag

SEQ ID NO: 52966 - DNA, 422 bp, Glycine max
  Clone ID: LIB3167-035-P1-K1-C5
ttacagtatccttccgataataaaggtggttgcgcgaatcgctggtgagcgtttgggggggttcctactaaggtggacattgccaaacgggctgatcccaaagctaaggccttgaacaaagctaatgctggcaaatcaagtggacaagtgtttaggacgaaagctaaaacgatcacgacataggtgacatttcacatgccaaggaccttgatagatgaaaggaaccgtacgtaccctcgcgttaaggctacacccagaaacacgttggaccattatcagatacttaaattcactatcactactgagtgtgatatgaagaaaactgaggataacaacacgctggattatattgatgaccttcatgcaaacacgataacgattgaggatgctgtgaagaatatggacgacattcatgcaaagaa

SEQ ID NO: 52967 - DNA, 419 bp, Glycine max
  unsure at all n locations
  Clone ID: LIB3167-035-P1-K1-C6
cccacgcgtccgttgttccttcaccaaccaggtcattgctcagcttgagttgtggaaggagaagagtaccggcaagtacgagaagaaagtttacgttttgcccaagcaccttgatgagaaggtggctgcacttcaccttggcaaacttggagctaagctcaccaagcttagcccggcccaagctgattacatcagtgtgcctgttgagggtccatacaagcctgctcattacaggtactaagtaattgagattatcaacggaaagtgagggaaagacaaaatcggttntatgaatcggattgattgtttaattttcctttttttgaatttttgttgttagacttttcagatttgaggtagaagaagtttagctttttttatttttaatttccgtagaatttctgttcgagtgggtggga

SEQ ID NO: 52968 - DNA, 365 bp, Glycine max
  Clone ID: LIB3167-035-P1-K1-C7
cggaaagagtgtgccttctgtgactggccagatcactcatcaactacccagaggtaatgtggtgcctgttctgctccagcctaataatttttcaaatggagtgccagtttctaatcaaccatcacaagtcaagacccaagtttctctagggagcggagtgattgctgccaaagaaattcctgtagatggaagccatgcactcgtctctctcactcaaaccagccagaatttattgccaagcagtgtgcaaagtgaaggtgtttcaccacataatcaatcttcatccaatgtgttgaatgaagatcaagctaaatctatgagaatgcctggcatgccttttgagcaactggttactgaagttgtta

SEQ ID NO: 52969 - DNA, 350 bp, Glycine max
  unsure at all n locations
  Clone ID: LIB3167-035-P1-K1-C8
gggaaaaagcgcttgtgggacgcgttgtcttacttggagctaatctcaccaatcttgagggcgggccaggctgattacatcagtgtgcctgttgagggtccatacaagcctgctaattacaggtactaagtaattgagattatcaactgaaagggagcgaataacaaaatgatatttatgaatcggattgattgtttaagtcaacgctttatgtatttgaagtgatatacctttcagatttgaggtagaagaagtttaactttctgtattttcaaatgagatctgatgcaacttgtagaaggngggaccactaatgaagaagagatctggagcaattctgatacttgcat

SEQ ID NO: 52970 - DNA, 413 bp, Glycine max
  Clone ID: LIB3167-035-P1-K1-C9
gcagtggtcattttgatgactgtttcagcacagcacaaagcagccctcaccgcgggggtctactctgcagtgtcaagatcagaagattcaaagcacccttttgctttccataggccagcttatgcagaatccatgtcctatgactaccctttgtttccaaattacatggctaacaccgaatcatcaagggctaaagtcaggtcacacagtgcaccaaaacaaagaccggattcattcgagaggcaaccaagccggcgaagagcttcagttgagggaagaaatgtcccaaggccaatgaggatgcaaagatcatcttcacatgtgggtgccactgtccataactaccattatccttggtcaataaagctcgatagatccgcagtttcactcaaagatagtgagtgtggctctac

SEQ ID NO: 52971 - DNA, 362 bp, Glycine max
  Clone ID: LIB3167-035-P1-K1-D1
gccaagactcttgaccagttttacagcagagatgctggtaattgatgattaagcaggcaggttcatataccttggtctcctgctcaaccaatgcctactgtcatcagcaatttatttgcttctttgctttctgccccccaccacccaaatccacatttcttctatgcagcataaatataataaaaggattgagtctgtttgagggcctcatattttgagtcggtcggtagtcggaaagtagaccccatagatgctatatgattcctgagccattttttcttttggtgggggaaaatgagttgtgttagtttgggatggcgtcgattgcattgtgggatgttcatattccctgctgtttgaat

SEQ ID NO: 52972 - DNA, 418 bp, Glycine max
  Clone ID: LIB3167-035-P1-K1-D10
cagcaattttctattttctcctctcatggcttcagattccaaaaaggatttccctggtgatgacaaagctggaacagaagagagtaaaacatccaaagatgagacttcatctaaagattctccagcagaacaaagagcgacagctacttttggacctagacctggacctgctgggcctccaggcaacccttttgatctctcagcaatgtctggtctgctcaatgatccaagtatcaaggaattggctgaacagatagcaaaagatccatcgttcaatcagatggctgagcagcttcagaaaacttttcaaggagctccacaagatgctatccctagcttcgataatcaacaatatttttcaaccatgcaacaagttatgcagaatcctaattttatgaccatggctgagcgcctgggt

SEQ ID NO: 52973 - DNA, 67 bp, Glycine max
  Clone ID: LIB3167-035-P1-K1-D11
aaaagttaaaaaacctccggcgcccacacataaccccacacatcctcccacacaattcttttctcat

SEQ ID NO: 52974 - DNA, 418 bp, Glycine max
  Clone ID: LIB3167-035-P1-K1-D12
cccacgcgtccgcccacgcgtccgcggacgcgtgggagagtttgttgtgagctataagctagtttatcgtgaggagaatatgaagttgtttgttttctttgttgctgcagtagttttggtagcatggccatgccatggcgcaggctaccaaaggttccctctccgaatgaaaactggctatggtgagcgttcttcggaggtaaaatgcgcaagttttaggcttgctgtggaagcacacaacatccgagcctttaaaaccattcctgaagagtgcgttgaaccaacaaaggactacattaatggcgaacaatttagatcagactctaaaacagttaaccaacaagctttcttttatgctagtgaacgcgaagtccatcacaacgacatatttatattcggcatagataacaccgtactc

SEQ ID NO: 52975 - DNA, 419 bp, Glycine max
  Clone ID: LIB3167-035-P1-K1-D2
gctgcttcttgcaacccttatcctcatgccttaagggcttgctacttactacaaaggggttaagaagccaccggtgtacaagcctccagtgtacaagccaccagtgtacaaaccaccggtttataagccaaaaccaccggtttacaagccgaaaccaccggtttacaagccaccatataagaagccaccatacaagaaaccaccttatggaaagtactctccagtagaggacaacacccatgcctaaagcaagcaatgaggtctattatctacttaataaataagaggaactgctttgtgttttctagcattgtgatttacaactgcgtagcaatgcatattcttgactcttgcatgcacttcaatccttcagagcattaatgatgtggccaagtcatcatgagcatcatacttatttg

SEQ ID NO: 52976 - DNA, 394 bp, Glycine max
  unsure at all n locations
  Clone ID: LIB3167-035-P1-K1-D3
ggaaanacccggggggacccacgcgtccgagatgattccatatctatcctagagctgataaaggttcctcattcccctcaatgctgcccagaaccagtagaattgccaatgcccaacttttccgattggtttgaccattcaatgcagtggagctctcctccatcttctccgttgtcatgggactctccatcttcccttgcatggcaaaatgaagcagttgaatttgttttgaaggaagaaattgctgtccaagtgtaacctactatttcttttgtcgtgtgattgaaaaagtgaatcccaccgttgtgaatgattgagcctcgtttttggtttctttctgtattgctgcataatcctagtcccttcagttgaatgaatttctagtttttgtcaa

SEQ ID NO: 52977 - DNA, 421 bp, Glycine max
  Clone ID: LIB3167-035-P1-K1-D4
cacgactctctcgaagttagtttaggtttagggttaagttttcttttccttcaatcttgcaagaaattcttctccgcacgatgcctcccgggcctctctgaaatccccatgacgtgaacgccccgatgcacgtgccaaatcgccgccgttcgtgttgcagtttagccccaattttcccacggttgatctgtgtcaaagtaacggcgaaattcctctttttcaatttctctctcttagtttcgatttggtgttgaatggatgcttgctgaattcgccttgctataccttcagcttcttttcgaacaccacacgtgttctctgaaaacggagctagtcctaaaggcgtaaatcgaaacgcggtcgtttttcaccttggggcgagggttcttcttttgttcctccgaaaacagccatcacataa

SEQ ID NO: 52978 - DNA, 350 bp, Glycine max
  Clone ID: LIB3167-035-P1-K1-D5
ataaaactgatcttggacacatacaaatcctatttacgaacgcgcatgccaaggcgggggggattatggctaagagcagaccgctggttactgacagccactggtcccgatcgagtacactagatcaaatcattgtcgaaaagacactcgcaagagcgagagctgtgctacatgaactacaagtctgaaagccccaaatgctggccgttgtgcgaggaatagcagcactggtcgtgggcgggccatacgtagcagacgaattcgagaaagcacgattctaagactaaagcctgaacctgcccataataatgaaggagtttctgatgatgatgattgacgtggacatgata

SEQ ID NO: 52979 - DNA, 422 bp, Glycine max
  Clone ID: LIB3167-035-P1-K1-D6
agctcaccggccaagtcatcgacgtgccgggcgacccgtcctctacggccttcccgctggttgcggccctgcttgttccgggctccgacgtcaccatcctcaacgtgctgatgaaccccacccgcaccggcctcatcctgacgctgcaggaaatgggcgccgacatcgaagtcatcaacccgcgccttgccggcggcgaagacgtggcggacctgcgcgttcgctcctccacgctgaagggcgtcacggtgccggaagaccgcgcgccttcgatgatcgacgaatatccgattctcgctgtcgccgccgccttcgcggaaggggcgaccgtgatgaacggtctggaagaactccgcgtcaaggaaagcgaccgcctctcggccgtcgccaatggcctcaagctcaatggcgtggattgcgat

SEQ ID NO: 52980 - DNA, 175 bp, Glycine max
  Clone ID: LIB3167-035-P1-K1-D7
gtacataataacattgattacagatgcatcaagcactaaacttatatagttcggtggcacatcactctgcaggctttctcaaacttagcataatattcagtttctcccttttccctcctaaaaaaaaaaaaaaaaaaaaaaaaaaggacggaaaataaaaaaaaaaacagggctt

SEQ ID NO: 52981 - DNA, 404 bp, Glycine max
  Clone ID: LIB3167-035-P1-K1-D8
ccggtgcggaagaaccggggcggcgacccacgcgtgcgcccacgcgtccgcccacgcgtacgtatttttctcttttccgttctgttctggtctgctttgcccctctgtggtgccaatgactactcaccattctctctctttccaactcctctgagcctcgctcgttaggttctctgtctcttctcggagacccacaaaacaatttcttatttatttccttctcaaacaaagaacctctatttgcccttggctgctcagatctagtattcctcaagtcacaacctttttttgttccgctagcggtgcgagacatgagtaaagaagaattcttgaagatacagaaatgtgttcttaaagtgaacatacactgtgacgggtgcaagcacaaagtgaagaaaatcttg

SEQ ID NO: 52982 - DNA, 412 bp, Glycine max
  Clone ID: LIB3167-035-P1-K1-D9
gtagcatggcaatgccatgcgtacgatatgttccctctccgaatgaacactggctatggtgcccgtactccggaggtgaaatgcgcaagttggaggcttgctgtggaagcacacaacatctttggctttgagaccattcctgaagagtgcgttgaagcaacaaaggaatacatccatggcgaacaatatagatcagactccaaaacagttaaccaacaagcttacttttatgccagagacctcgaagtccatcccaaggacacatttgtgttcagtatagatggcaccgtactctctaatattccatactacaaaaaacatggatatggggtggagaaatttaactcgaccttgtatgatgaatgggttaacaagggcaatgcaccggcactgcccgagactctaagaatta

SEQ ID NO: 52983 - DNA, 405 bp, Glycine max
  Clone ID: LIB3167-035-P1-K1-E1
cggacgcgtgggatggtgaataagtggttatcatacttctacccaacatcaatggggggggtatcctgctgcatgctcatactgataaatcgatacggaatctgacgatcgagaagcttgcagattcaaaatcatggccaactgcatggagacatacaccattggggagaagcagcagcaagaagaaggagaagaagaaagaggaggatttgtgaagaatggtctaagcatgaaggttgtgctgacaaaggaggaactaaagtggctgatactcgaactgaacgacaaaggaggagtgaggctggaacaaatgctggaagagatagaaagaggcagaagagaacaaaaggttgaggatgagatggggtggaagccttctttggagagcatattggaggctcctga

SEQ ID NO: 52984 - DNA, 412 bp, Glycine max
  Clone ID: LIB3167-035-P1-K1-E10
cccacgcgtccgctataagctagtttatcgtgaggagaatatgaagttgtttgttgtctttgttgctgcagtagtgttggtagcatggccatgccatggcgcaggctaccaaaggttccctctccgaatgaaaactggctatggtgagcgttcttcggaggtaaaatgcgcaagttttaggcttgctgtggaagcacacaacatccgagcctttaaaaccattcctgaagagtgcgttgaaccaacaaaggactacattaatggcgaacaatttagatcagactctaaaacagttaaccaacaagctttcttttatgctagtgaacgcgaagtccatcacaacgacatatttatattcggcatagataacaccgtactctctaatatcccatactatgaaaaacatggatat

SEQ ID NO: 52985 - DNA, 426 bp, Glycine max
  Clone ID: LIB3167-035-P1-K1-E11
ggaatttcgaataaagggaaagagggtgcaaagtgcatcttctttttgttggtctggcaaactttaacaatctcataaataaataatcagaacgaagaagaagaagaattgaattcgaaaaatcgtagcgtagcgttggttgcgattgaaacggtacgatgggaagaggaaaattcaagagcaagcccaccggtcgccgccagttctccaccccggaagatatgcttgctggaacctctaaccgtcctcgaacttttagacagaaagaagctgagcatgaagaggagcctgaggaagtatctggggatgaatctggagaagaatcagaagaggaaacttctaagaaaaaaggaacacaaggagttattgagattgaaaatcctaacttggtaaagccaaagagcttgaaagctagagatgttgatg

SEQ ID NO: 52986 - DNA, 422 bp, Glycine max
  Clone ID: LIB3167-035-P1-K1-E12
cccacgcgtccggtcaaaacggcatcgtgggggttgtccaatggacaagtggcggagattctcgttacctataatgccgccacgagcctcttggttgcttctctgatccacccttcaaagaaaacaagttacatcctctctgacacagtgaacttgaagagtaatcttcccgaatgggtgagcgttgggttctctgccaccaccgggttgcatgaaggctccgttgaaacccatgatgtgatttcttggtcttttgcttccaagttgtcagatggtagcagcaatgatgctttggatcttccaagctttgtgctcaatgaggccatctaacttcaaacatcgtagttaaatgtgacaaaagaaaaatgtaataacgccctagcttgctagaggctggtgctactaataatgtttgtcacaaa

SEQ ID NO: 52987 - DNA, 414 bp, Glycine max
  Clone ID: LIB3167-035-P1-K1-E2
cccacgcgtccgcctgagcttccattgtgctcactcatctcttacaacgaaaccctgttcatcttgttctatctgtgacgagcatcatggcctcaagagcagtgttattgttggctatgtgtgtgcttccggcgatggttgtggccattcgcccagcaaagaaccctttttgcgtgaagggtcgtgtctactgtgacccttgccgtgctggttttgagacctcagctaccacctacattgctggtgctgagattatgttgcaatgcaagagcagggttagcaacgaggttgtgtacacgaagaaggggtacaccgactcaaccggagcatacacaatgtacgtggatgaggatcacgcagatcagatctgcagtgccaagcttgtaagcagccctcaccctcaatgcaaggaag

SEQ ID NO: 52988 - DNA, 443 bp, Glycine max
  Clone ID: LIB3167-035-P1-K1-E3
ggaaggaacgggggggaccaccccgtccgcttttatgaaattgatctgaacttcttttccattcttaatttatcttcaatcagcatgaagaagatcacttcctctcaatttcttctcttcctttcactccttgctttatggttcacatcgattgcttttggagctgataccactcacccagaagaagtgcaagctctgaaagatatgggcaagacgcttggtaagaaggaatgggacactgacatagatccatgctcaggacaacctccctggttcacatctaaggagaacaacaatgtcacttgcaattgcactatccccggtgaaaacttctgccatgttgtaataatattgctgaaatcacaaaatcttcgaggcatgctcccacgcgaactgataaggttaccttaccttgaagaaatgtacgtaactaatcttctttg

SEQ ID NO: 52989 - DNA, 319 bp, Glycine max
  Clone ID: LIB3167-035-P1-K1-E4
gtttgttgtgagctataagctagtttatcgtgaggagaatatgaagttgtttgttgggtgtgttgctgcaagggttgtgggagcatggccatgccatggcgcaagctaccaaaagttccctctccgaatgaaaactggctatggtgagcgttcttcggaggtaaaatgcgcaagttttaagcttgcttgtggagcacacaacatccgcacctttaaaaccattccttgagagtgcgttgaaccaacaaaagactacattaatggcgaacaatttagatcatactctaaaacaggtgaccaacaagcttttttttatgct

SEQ ID NO: 52990 - DNA, 425 bp, Glycine max
  Clone ID: LIB3167-035-P1-K1-E5
gaagcctaacagcagcaaagagcgttagagctgatcgcttgagataaggtcaatttgcaggggcacgcttcccaagtcgcacacccatatcacatcacatctttctccacacgcaacgcaacctttttataatcaatcatcctcactcgcatttgaagacgcagcaatctttcccgtgaaaagggaccatggaggcaaattcaggtgccagcgaccgaatttcgagaatcgccggccacctccgcccccagagagaggatgatgtttgtttgaagcgtagcgattgccgtgcaaaaggtggggtctccggattcaaggtggccatattgggtgccgcaggaggcatagggcaacctctggcgatgttgatgaagatgaatccactcgtttcacttctccacctctacgatgttgttaacacccct

SEQ ID NO: 52991 - DNA, 409 bp, Glycine max
  Clone ID: LIB3167-035-P1-K1-E7
tttcaaagggaaacccaaaaactgaagcgcgaggaagctaaaagtagcaacgagggatgagagaacaagaggattggaggattacgacagcgctgttaacgttgttgttggtgtttgtttcttcttttccggcgttgagctacggagttgttcctcctcgtactctgctcaataagctgtctcagggcagttatctcaccactcaggagcaatggttcaatcaaaccctcgatcacttctctccctatgatcaccatcaattccgtcaacgttacttcgagtttctagactatttccggattcctgatggaccaattttcttggtaatcggtggtgaaggtccatgtaatgggataacaaatgactatattggtgtactggcaaagaagtttggagcagctatggttac

SEQ ID NO: 52992 - DNA, 387 bp, Glycine max
  Clone ID: LIB3167-035-P1-K1-E8
acacgtccgcctgagcttccattgtgctcactcatttctgacaacaaaacccgggggatatgaatcactctgggcacaagcattacctacaaggcccacaaaaacggcatcaagaaacccaagaggcatcgccacactttcaccaaatgggtagactatctatctctctctctctctctctctctctctctctcttttatgtttttgggttctcttttactctgatacatatgtatatttattttcgggtaatttaattatgcttgttttaacaaaataaataaatatatgcgtttgtgttgttggcaattggtgtacatggatcccaagtttctgaggaatcagaggtacgcgaggaagcacaacaagaagagtggtgaaacagac

SEQ ID NO: 52993 - DNA, 415 bp, Glycine max
  Clone ID: LIB3167-035-P1-K1-E9
cggacgcgtgggcggacgcgtgggcgtacgcgtgggtttttggtagcccatgcggagtgagacatttgcaataattgaatacggatttgttgtgcgcgctagatatttggagtttggacgcagaaattttcttaaattattgtagggaatgaaattgaaagggaaaaaaaaaatcaaaattatcttgagcggtaacacagagcagagcacggaaaggaaaaacctcggtagagttgagggtttagcggcagcatagagaatagagatagagcgaattgaaactctctaatggcactctacacccatctcatctctttctcttcttcttcttttcttcattcaccttcgcctctatgtcttccaaagcctctcttcccttcttttactttgacagtgggcaattcaacctcccaca

SEQ ID NO: 52994 - DNA, 413 bp, Glycine max
  Clone ID: LIB3167-035-P1-K1-F1
cccacgcgtccgaaaaaatgtataaatgattttgtcccctttacaatctgcattctgcagctatcccaattaaatttcagagtacaactctacagtgattcctttcctgttaacaatttgactgccttttgttacttgatagcttcaatgggtttacaaatcatttggagttttgtgcttgctttaatggatttgtatgctttggtgagaaagaaggtcctcctcaacccggtactaattagcctctttgtagttggagattgggtaacagcaacactatctcttgcagcagcttctgcctcggctggtattacagttttgagaagtacaatgtggagaaagatgttgcggagcagataaagaaggagttcgataagaggcatggccccacttggcattgcatcgttggtcgt

SEQ ID NO: 52995 - DNA, 422 bp, Glycine max
  Clone ID: LIB3167-035-P1-K1-F10
gtcgcgttgtgttgcgtcgtgtcgtgcgctgttcctctgtttctcgtttttgtgggcagaccgaaccctagctccgcatcgcaaccatgtcgaccaagcaaggtggaaaagctaagcctttgaagaaacccaagtctgataagaaggattacgacgagattgatgtggctaacattcagaagaaaaaggaagaggagaaggcgctaaaggagttgaaagccaaggcgcaacagaagggaagctttggaggttctgggctcaagaaaagtggaaagaaataagggctctttatcatgattgtatgcattcaatattgagccctgtaattacagttgctaccatgataacttctcttattattgtggcctactttattgctaatgtgtactgaactgaggtatgtcgtgatgtaagctgcaata

SEQ ID NO: 52996 - DNA, 429 bp, Glycine max
  Clone ID: LIB3167-035-P1-K1-F11
gagaaatttaactcgaccttgtatgatgaatgggttaacaagggcaatgcaccggcgctgcccgagactcttaagaattacaacaagctggtgtctcttggcttcaagattatattcttgtcaggaagaacactggacaaacaggccgtaacagaagcaaacttaaagaaggctggctaccacacatgggaaaaattaattctcaaggatccacaagatccttccactccaaatgcagtttcatacaaaacagcagcgagagagaaactgataaggcagggatacaacattgttgggatcattggagaccaatggagcgatctcctcggaggccacagaggcgaaagcaggacctttaagcttcctaatcccctgtactacattcagtagttccttcacctctcaacaatctagcttgctcctatctat

SEQ ID NO: 52997 - DNA, 425 bp, Glycine max
  Clone ID: LIB3167-035-P1-K1-F12
cccacgcgtccggtttgactgaagatcagggtttgccttcagaaatgggaaataagcaggaaaattttgatacaatacaacatgttgactgtcttactcaacagatgggacttcatgcattggagtactgattgtgtgtatatatgttactcacaactgaaggttgaggtcccctttgctactgagcagacaaagccatcttacttatacaacaaagaaacctgacagatccaacaacttgatcggtgcttttatccgcttgtaatgtcgtcgtgtgttctgtttgtcattgggggcttaaaaacatacaagttcacgaaacttcatatatctccatgtattttgaattttaataactatgcccccgtttccaatgcgatgatatttttgtggggatggtccgaataattggatcataacttttg

SEQ ID NO: 52998 - DNA, 414 bp, Glycine max
  unsure at all n locations
  Clone ID: LIB3167-035-P1-K1-F2
aaaatgtggaagagaacgggttttgaagaataagcagttcaattgatcaactcaggggtgagggacctaagtctagctgctaatagactcgcccatcatgccatcaaacttggtggcattggctttggagcctcttttttcggattgtttgctgccattgctgctatttatctgttgattttggatcgtacaaactggaaaacaaatattctcacagcactactcattccatacattttcttcagcttgccttcattaattttcgacgtcttcaggggagagcttggaaaatggattgctgcagttgctgttgtattacgccttttccttccaagacacttccctgattggctggaattgcctggtgctctgattcttcttatcngtgtagctccttctctaattgcaagcacc

SEQ ID NO: 52999 - DNA, 372 bp, Glycine max
  Clone ID: LIB3167-035-P1-K1-F3
gattcatgggcccaagagcaaagaacctaatatgatttggggcacattggcatccagacaatgcttttggcaccaccatgccctaaccactccaaccagagcttaatcacagggcttagttgtgagcaccaaaccaaaccacattgtttgcaaggcacaaaagcaggttgtccaagagggtgaggacactactaacattgtctctcgcaggttggccctcactgttctcattggtgctgctgctgttggctctaaggttgcacctgctgatgctgcctatggagaagctgccaatgtgtttggaaagccaaagacaaacactgactttcttccatacaatggggatggattcaaactctcaattccctcaaa

SEQ ID NO: 53000 - DNA, 381 bp, Glycine max
  unsure at all n locations
  Clone ID: LIB3167-035-P1-K1-F4
cccacgcgtccggaaatataactaatattctttagaataatcaaaaagaatattaaattcaaataaattttagatagaaaaaagacttaaaaaggaggatttgaaatgcgagatctaaaaacatatctttccgtggcaccagtagtaagtactctatggttcggggctttggcgggtctcttgatagagatcaatcgtttttttccagatgcattgatattcccttttttttcattctagttattgacacggaaaggggtgaagaagattatagatccaattaagtattaaatatatgtaattaatatgtaattaatctcctcttctttatttcgncttttatttcttcttttttttacaattgtaatagaataagttagg

SEQ ID NO: 53001 - DNA, 391 bp, Glycine max
  Clone ID: LIB3167-035-P1-K1-F5
cttttctgtccaaattctgattctcttcatggatttcccgttcctggtatctactctacctttttctttttctctttccttttcttttcttttaattttgttttttttcttgcgaaactaggaaaagctgaaaatttggaagaaaaaagcagagcaagaagaagaaggtcctcctctggtgtggttcgaaacctctgccactgtttctcgccgcttccagtttgaacccaatggccaactttctgtactctccaactactcaccctctttacaaagttgtaattgttaaataaaaaaaagttaggagttaaaatattgttacttgctctaaggaaatgtttttttttttttttttccaatggtaattacaaaaacattatcttatttcact

SEQ ID NO: 53002 - DNA, 382 bp, Glycine max
  Clone ID: LIB3167-035-P1-K1-F6
ggaggttttaactacagggaagagcctgaccttgatgcagctttgaaaaggcactttccagaaggcattgatgtttactttgagaatgttgggggcaagacacttgacgccgtactcctgaacatgagagtccgtggtcgcatacccgtctgtggaatgatctcacagtataatcttactcaacatgaaggtgtaacaaatttggcacagatcatatataagcggattcgtttgcaaggctgtaacttcatggatttcgttcacctatatcccaagttcttggagtttctcctgccaaatatcagagaggggaaggttgtgtatgtggaagacataactgaggggcttgagaatggaccttcagcattggttggccttttta

SEQ ID NO: 53003 - DNA, 378 bp, Glycine max
  Clone ID: LIB3167-035-P1-K1-F7
cctttgttcactctactgctcttgcggctagggtgatagcgcagcttctcgtagatctaaggaagatgggtccggaaaaggttcacatcaatattgtgggcattggccatgtcgactctgtgaaatccactaccactggtcacctgatttacaagcttggaggcattgacaagcgcgttattgaaagggttgagaaggaagctgctgacatgaacaagagggctttcaagtatagcctgggtgctggacaaacttaaggcgtggcgtgcaagatgaatcaccattgatattgctgtgaggaagtttgcaacaacaaagtattattgcacaattatcgatgcgccttgacatacggatttcattcagaatatgattact

SEQ ID NO: 53004 - DNA, 413 bp, Glycine max
  Clone ID: LIB3167-035-P1-K1-F8
ctttttctacttaccttttctcttaattcaaatacgatggcagccatggcaaccacaaccctctcttcaaaccccaaactctcattcttcaacggaaagcccgtcacatattcttcccgcgtcgcgcccaccaccaaattatcctcatccaaacaaggcacaatttccatgtccctaaccccacccccctacgacctccagtccttcaaattccagcccatcaaagaatccatcgtgtcacgggaaatgacgcgccgctacatgaccgacatgataacctacgccgacaccgacgtcgtaatcgtcggagccggttcggccgggctctcctgcgcgtacgagctcagcaagaaccccgccgtgagcgtggccatagtcgagcagtcagtgagcccccgcggcggcgcgtggct

SEQ ID NO: 53005 - DNA, 401 bp, Glycine max
  Clone ID: LIB3167-035-P1-K1-F9
ggctgactggaggaccaggatgcagcattgaactagctttgttttacgaaaatggtccttttcagcttaccaagaacttgtctcttgtgtggaatgactatggctgggacaaggcatcaaatattatatttgtagaccaacccactgggacggggttcagctatacttctgatgagagtgacattcgccatgatgaagagggcgttagcaatgatttgtatgacttcttgcaggcatttttcaaggagcaccctcaattcactaagaatgacttttatattactggagagtcatatgctggacattacattccagctcttgcatccagggttcaccaaggaaacaaagcaaaagaaggaattcatataaatctaaagggatttgctattggtaatgggtta

SEQ ID NO: 53006 - DNA, 135 bp, Glycine max
  Clone ID: LIB3167-035-P1-K1-G1
tttttagattgcgggggggtcgtctattaaatggaatgactatctctggtacaagtcattaatatattatttttttttaccaacccactgggacggggttcagctatacttttgatgagagtgacattcgtcaat

SEQ ID NO: 53007 - DNA, 406 bp, Glycine max
  Clone ID: LIB3167-035-P1-K1-G10
cccacgcgtccggagaacataccaatctacaataaacgatgattctcattatctccgtcattttttctcttctctctttctcccatgcttctgtcctagatttctgtgttgcagattatgcaggtcctattggacctgcaggatattcctgcaagaagccttcaaaggtcacagcagatgattttgcttacagtggccttggcattgctggtaacacctcaaacattatcaaagctgcagtgacccctgcatttgatgctcagtttgctggtctcaacggtcttggcatttccgcagcacgtttggacttagcagcaggtggagttataccacttcacactcatcctggagcttcagaattacttgttgtaattgaagggagcatcctagctggattcatttcttc

SEQ ID NO: 53008 - DNA, 429 bp, Glycine max
  Clone ID: LIB3167-035-P1-K1-G11
caagtagttgagaactaagaaggagaagcaaatggcttcctcaatgatctctgccggggctgttaccactgtcaaccgtgccggtgccggcatggttgctccattcactggcctcaagtccatggctggcttccccaccaggaagaccaacaatgacattacctccattgctagcaacggtggaagagtgcaatgcatgcaggtgtggccaccagttggcaagaagaagtttgagactctttcctacctgccagaccttgatgatgcacaattggcaaaggaagtagaataccttcttaggaagggatggattccttgcttggaattcgagttggagcacggtttcgtgtaccgtgagcacaacaggtcaccaggatactacgatggacgctactggaccatgtggaaactgcctatgtttggttgcac

SEQ ID NO: 53009 - DNA, 408 bp, Glycine max
  Clone ID: LIB3167-035-P1-K1-G12
ctcaacactctcgctagacacttcctttcgcaaatggcttctcacgacagcatctgggcttctccaacctccgcttgtgattccgtcttcaatcacctcgttcgtgctcccgaagatcctatcctcggggtaactgtcgcttataacaaagatccaagtccagttaagctcaacttgggagttggtgcttaccgaactgaggaaggaaaacctcttgttttgaatgtagtgaggcgagttgaacagcaactcataaatgacgtgtcacgcaacaaggaatatattccgatcgttgggcttgctgattttaataaattgagtgctaagcttatttttggggctgacagccctgctattcaagacaacagggttaccactgttcaatgcttgtctggaactggttcttta

SEQ ID NO: 53010 - DNA, 326 bp, Glycine max
  Clone ID: LIB3167-035-P1-K1-G2
cccacgcgtccgcccacgcgtccgactttttgtccgccgaaagagtgcatgaaaccaagctacataatggtgatgacgtggcatcacaacaaatcgatcaaacactggacttgtaccatagatggtaaggttacaacatatgacctgagcattgaatctgcaaatgaacctaactaaacaatcacttacaagatcttcggtgaagatatcgatcaccagtataaggtctttaatgacttccactttgctttttaacaccgttttgcggctgctatcaacaaaattaacttattgaatctttattttattttataaatagaattttt

SEQ ID NO: 53011 - DNA, 224 bp, Glycine max
  Clone ID: LIB3167-035-P1-K1-G3
ttagttctagatcggggccggccgatttttttttacaactagaaattcgaacttagggaaaagcttgggagctgatttggcttttgactacacatataagaactttgatgatttgccagaaaaatttgatgtagtttatgatgccattgcgcaatgtgacagggcagtgaacgctgagaaagaaggcggtagtgtcgtggcactcacaggtagctgtacaccat

SEQ ID NO: 53012 - DNA, 405 bp, Glycine max
  Clone ID: LIB3167-035-P1-K1-G4
acagaacagaaccaccagtgcttttcaaagacggattcagcaatggcgttcttaaataaaattggaaatctggtcaagaattctgctgtcaagcacatcaatcaagatttttcagtgtctaccccatcacttttccaagcaattagatccatgtcatctgcaaagctttttgtcggaggtatttcttacagcactgatgatatgagtttgcgagagtcttttgctcgctatggagaagtaatagatgtcaaggtcattatggatcgtgaaactggcaggtcaagaggttttggcttcataacttttgcaacaagtgaggatgcatcttatgccattcacggcatggatggtcaggatcttcatggtcgcaggatacgggtgaattatgctacagaaaggtcacgt

SEQ ID NO: 53013 - DNA, 409 bp, Glycine max
  Clone ID: LIB3167-035-P1-K1-G5
cccacgcgtccgcccacgcgtccgcccacgcgtccgcccacgcgtccgggaagaagcatacctaggtacctgcttcctgaacatataggaccatgtggccttaagatcacatattctggacattcagacttaagtgtcaagtttcaaagtcacagaagcagagactacactaatccttaccttcctgttgctcaatctgccatggagggaagtggacagcccatggtgggtttggatgggaagagactggaggccgagagtaatgttcttcttgcatctattgagaacatgcagtatactgtaaccttggatgtcttacacatggttttctctgcctttggacctgtccaaaagattgcaatgtttgacaagaatggtggtttacaggctctgattcaatatccagata

SEQ ID NO: 53014 - DNA, 375 bp, Glycine max
  Clone ID: LIB3167-035-P1-K1-G6
cgtaccgcagcgccatcgcgcgcagagactatgaggccagccaccgcgacacatggcgagccgctctctccgaattcatctccacactcatcttcgtcttcgccggctccggctcctccgtggcgcgtaacaagctcaccgtcgacaagccctacgccctcgtcgtcgccgtcgtcgcacacgccttcggcctattcggcgccggctctgtaagcactaacatctcatgcggccacgtgaaccctgctgatacgttcggcgccttcgtcggcggcaacctcaccttgctccgctgcgtgctcttctggatcgcgcagattcttggctacgtcatcgcttgcttgctcctcaaattcatcacccgccgacaggatg

SEQ ID NO: 53015 - DNA, 464 bp, Glycine max
  unsure at all n locations
  Clone ID: LIB3167-035-P1-K1-G7
ccgtccgcctcaccgccgtccgcaccgtgaacagtgtaatatataattaggtattggaagccagcatcagggggcgcgattaagtgaatgggggcggaacgcgcttatnncagaaatcacgaccactctcatcttctacanccacnnttacttgcttcggcttccgttcaccggtccctgacccactacctctcgcaaacaaccttggacttccgctcaactggtcaacccgcactcatgcctcttcagcctacggttgccacgcctggcggcacccattctccgcgttgcccaaagatatncgcggagaacaacccctggctcacgtgttcttgccgtctgttccgagaccatgtttgcctcgtttcgcgctcctagcgaatccaacgttgaggttctcgtaggacaggctctgttcggagacggtgccgccgccgtcatcattggcgcggatcctaagcact

SEQ ID NO: 53016 - DNA, 405 bp, Glycine max
  Clone ID: LIB3167-035-P1-K1-G8
cacttccaacacttattcaatttttatctttcttttgctctttgcgcattataagcgttctcttgtcattacaacccccccgttactcaaatcagaaactctcatttgaagctaacaaacaacaaagatcaacggatctatctaccttcagtcatggtgttttctttcaaccaacgcttctgggtttcttcttcgcttctcctcctcgcggtcctctctgtttcttctctcactcccactttcctttctgacaccgttttcgattctcaaccagcgcataccggtcggaaccttcttcaagctaaaaagggttgttctgtgaatttcgagtttttaaactacacagtaatcacaagcaaatgcaaaggaccccggtacccttccaaagaatgttgtggggctttt

SEQ ID NO: 53017 - DNA, 419 bp, Glycine max
  Clone ID: LIB3167-035-P1-K1-G9
cccacgcgtccgctttttgattcattgaaagatgtcattgttatgaaatgtgggcgcacaatgcaccatgaatgttacctggagatgataaaaaatgacaaatattgttgtcccatatgctccaagtcagtgattgacatgtctaagacatggaagagaattgatgaagagattgaagcaaccgtcatgcctcaagattatcgaaacaggaaggtttggatactatgtaatgactgcaatgacacaacagaagtttacttccacattcttggccaaaaatgtggtcactgcagatcatataatacccgcacagttgcacctccagttcttccccaatgaccagatctcttgggttcaagaagggaacactgtcagcagaaagttaaagttagcaccctgttattactatggagggttat

SEQ ID NO: 53018 - DNA, 282 bp, Glycine max
  Clone ID: LIB3167-035-P1-K1-H1
gacggtaaaaaacgggggacccaccatcgccacctcccttttgatttttttaaaaaaaaaaaaaaaaaaagtggtaatttaaaagggggggtgaaacaaaataaattttatttataaatacagttgtcccatatgctccaagtcagtgattgacatgtctaagacatggaagagaattgatgaagaaattgaaacaaacgtaatttctcaagattatcgaaacaggaaggtttggatactatgtaatgactgcaatgacacaacataagtttacttccacat

SEQ ID NO: 53019 - DNA, 225 bp, Glycine max
  Clone ID: LIB3167-035-P1-K1-H10
cccacgcgtccgtcaagttgcttatgggtccaagaatgagataatccggtttgaagaaaccctgtatggtaaatccaggctcaagggtggtgtagctgttggagcagctgcttaatctgttaaacctgcaattcattgtctatttttatctgcttttagaaaaagatatatgctatcttcagacaagtacctgcaatttagtcacatttctgtttatcactgtgg

SEQ ID NO: 53020 - DNA, 61 bp, Glycine max
  Clone ID: LIB3167-035-P1-K1-H11
aaaaaaaaaaaaaaaaaaaaattttttttaaaaaaaaaaaaaaaaaaaaaaaggggggagg

SEQ ID NO: 53021 - DNA, 391 bp, Glycine max
  Clone ID: LIB3167-035-P1-K1-H12
gttccgtttagttaatttgcacataacttgttttaaagattttggaatcatccgaggggggaggggtcacaagatgggggggaacttggtgattatgcgaaagaatgtgttggatatcaacagcattaccagtgttaagggtgtcatcggaaccggcattaacatcattggaggagtcgtcgacaccgttactgctttggcgtcccacatctccatccagctcattagtgccaccaaggctgatggacatgggaaaggaaaagttggaaaggctacaaatttaagaggacaagtgtcgttaccaaccttgggagctggcgaagatgcatacgatgttcattttgaatgggacagtgacttcggaattcccggtgcattttacattaagaac

SEQ ID NO: 53022 - DNA, 412 bp, Glycine max
  unsure at all n locations
  Clone ID: LIB3167-035-P1-K1-H2
caacactgtctcttctcgctcttggcttttcgctcttcactcactctcattcattcgggtccaccgttcatggatccagtaagcgtgtggggtaacacgcccttggcgacggtggatcccgagatccatgacctcatcgagaaggagaagcgccgtcaatgccgcggaatcgagctcatcgcctccgagaacttcacctccttcgccgtcatcgaggccctcggcagcgctctcacgaacaaatactccgagggcatgccgggcaaccgctactacggcggcaatgaatacatcgaccagatcgaaaacctctgccgctcacgcgccctgcaagccttacacctcgacgcccaatcctggggcgtcaacgtccagccctactccggcttcccggccaacttcgccgnctaca

SEQ ID NO: 53023 - DNA, 418 bp, Glycine max
  Clone ID: LIB3167-035-P1-K1-H3
gttcttcgtcaatcaagtcaacccccctttcaatttcaaccctatctctgctctctggtgcttcatcatttgtttttggatctctctgtttccaagattttgagttatggcatcgaaacgcatcgtgaaggagctcaaggatttgcagaaggaccctcctacatcctgcagcgcaggtcccgtggcggaggatatgtttcactggcaggcaacaatcatgggacctcctgatagcccatatacaggtggcgtattcctagtttcaattcattttcctcctgactatccattcaaaccaccaaaggttgcatttaggactaaggtattccacccaaacatcaatagtaatggaagtatatgccttgacattctaaaagaacaatggagcccagcactaaccatttctaaggtccttttg

SEQ ID NO: 53024 - DNA, 462 bp, Glycine max
  unsure at all n locations
  Clone ID: LIB3167-035-P1-K1-H4
cggaatgtcccgggtgcgacgccacgccgataccggttgttngaatgatagaatcaaaccattgctttaaatgcattngtggctggacgatgcacgatgaggtgtggtcagatttggttctggggacgtggtgaaatgcnaggcttcttattaannntttgtgannaactacgattgnnttttcggatgccttattaannnatgaggnnctgganacgtcgagtgaaatctctgtaaatttggggttggcaactcggttctctgaagtttgttatttacccgacgcnnacttgnnnactttgctntnncattgtttgnngttcgacnngtgacnnttcttnnngaggagctnnntcgtttatttgtttctttaccctccaacgttgtattcaagnntatttaacccattaattgttgagcggtttcgcttttacccnaatttgcaaatcaatcannagaaac

SEQ ID NO: 53025 - DNA, 436 bp, Glycine max
  Clone ID: LIB3167-035-P1-K1-H5
cccacgcgtccgctcaatctcattcacctcaaccacttctcatcatctctatcaccgcatgttctcaaacacctacacaaaatgtgcttcctcaacacaaagtccctggctcacttcatgttgctaacaacaattgtagttggcattgcaatgggagattcatcaaaggacaaagaggaatgcactgagcaattggcaggcctagcaacatgtctgccctatgttgggggtcaagcacaagctccaaccccagattgttgtagtggtctcaagcaagtgctcaagaacaacaaaaagtgtttgtgtgttattatcaaagatcgcaatgatcctgatctgggtggtttacagattaatgttacgttggctttgaacctgcccacagcttgcaattcccctgtcaatgtctccaagtgtccagaactgctgcacatgg

SEQ ID NO: 53026 - DNA, 400 bp, Glycine max
  Clone ID: LIB3167-035-P1-K1-H6
cttccctccattcatcccacgcatggctgccatgaactctagcgtattggcctgtagctgtgccatatcaggtgcagcgtgttcggagctcaatgggaaggtcacttccgtggcctatgttgcatgctctggctacaagttgccattgatcaaagctgaggccagagttcctaaagccaaagaatctgaaggaggaaggagaggtgcccttgttctcttggcagctacccttttcacctctgcagcttccaattcttctgccaatgctgggatcattgaagattaccttgagaggagcaaggccaacaaggaattgaatgacaagaagaggttagctactactggagcaaactttgcaagagcatacaccgtggaaattcgtagtgcaagtccctgagaa

SEQ ID NO: 53027 - DNA, 411 bp, Glycine max
  Clone ID: LIB3167-035-P1-K1-H7
ataaaccctacttctacttccctttgttctcaaaccttatcccttatcctcccggggccaaaccatgtctaccgccgcagcttctctcgcactcccaaccctcactctccgaactcgacaacctctctgttctccccaatgcttctcctcgtccctctccctcacccctaactccaaacccatttccatttccgccgatttcctcaaaacaacgctgtcgtcgtcgtcgccgttgtcgctgtcgtctcgcttcgttccccgtgtctctgtgttggagcaggaggaggacaccttcggcgacggagacggccccagcttctcccgcgaccttaagctctttgtcgggaatctccccttcagtgtcgacagtgcgcggctcgcggagctcttcgagagtgcggagaatgtgga

SEQ ID NO: 53028 - DNA, 356 bp, Glycine max
  Clone ID: LIB3167-035-P1-K1-H8
tcttcccaccacttattctacacatgatttttttcaactctaacatattatcctgcgcggatgcaatataatgtgccgcgggatctaaactcaatctcacaatcattactctgcaatatcttcaatgaccatgctacaactatccagagaaccaacctcaattcataatacttaatctcaaacaatcttaatttctaagcatatttctccatacaactctttccatctaccctactcacctatctaactaccaatttttatcccatacttatatcattgaacattacctagacatgttcaaggactacaaataatccaattactacaataacctaaatacttctgtcactaacttt

SEQ ID NO: 53029 - DNA, 340 bp, Glycine max
  Clone ID: LIB3167-035-P1-K1-H9
ctcacacatgcgacgcgtgggctaccgtcatcactaggaacaagaacagaaactggactgcgtaacctacgtgagggctcactattctgttcttcctctgcccgaacttgccatcatacgtaccgtatggcggggccggcgctgaccccaacctctactacaacgccagtcatcggaatcggcagccatgccggcgaccgcgccttcagccgcctaagcaacggcaccggcgcctactacattgacgtctgctatgtcaaattcgttgaggccgacggcgcccgtgtcggtcccctcatctataccgagcctgcagagaagcttctcaacgagctcgaat

SEQ ID NO: 53030 - DNA, 249 bp, Glycine max
  Clone ID: LIB3167-037-P1-K1-A1
ctttcacttgacaaggttcgcttgcaaactccttgcattcttatataaggtttcgtattgtaggacgactgcaacaagtaagttgctcattgcgtgtgtcagatataaactctgaaagacaggattaaacaggtgtgctatcttgcactcatgaacgtgatgacagcaccactatgcaatgcactagtcgtgtgagacctcgctccttgtcgatcatatgggaacactatttcggtttacttacaaaat

SEQ ID NO: 53031 - DNA, 475 bp, Glycine max
  Clone ID: LIB3167-037-P1-K1-A3
cccacgcgtccggtgcgtggtctctttgaaggtggtatcaagctgccaacaaatatactgagcgcaaattagccccttaccagtcctcaaggaaatcttccgcactgatggtgaaaatacccttcaatttccaccacctcatgtaatcagagttagtaaatctggatggatgactgatgatgagtttgcaagagagatgattgctggtgtaaatccaaatgtaattcgtcgtcttcaagagttcccaccaaaaagcactcttgatcccgcaacctatggtgatcaaactagtaccataacaaaacaacagttggagattaacttgggtggggtcacagtagaagaggcaattagtgctcacagattattcatattagattaccatgatgcattcttcccgtatttgacgaagataaacagcctacctattgcaaaagcttatgccacaaggacaatcctgttcttgaaagacgat

SEQ ID NO: 53032 - DNA, 262 bp, Glycine max
  Clone ID: LIB3167-037-P1-K1-A8
acgggactgaccaaaccattttattttattttttaattaagggtgagggccatccatgggggccggtggtgctttctctgcaattacagcttttgccatctctacgccgagttcccggcagaagaatggatcacgagggtgttttcttagtggaaggaaattgagggtgaaaaaggtgagagcagcaattggaggacgatcgatgggcactacagtgtgcgcagttgctgagcctcgcagtcctctattggtcccaggcaag

SEQ ID NO: 53033 - DNA, 305 bp, Glycine max
  Clone ID: LIB3167-037-P1-K1-A9
tcttttctttttaaaccttttattattctgccaacaaatatactcagccgaatgattcccttaccagttcggcacgaaatctttcatacttatgtctaaaatacccttcaatttccaccacctcatgtaatcatatttagtaaatctggatggatgactgatgatgagtttgcaagagatattattgctggtgtaaatccaaatgtaattcgtcttcttcaagagttcccaccaaaaagcactcttgatcccccaacctattttgatcaaacttagtccatatcaaaacaacctttctatattaa

SEQ ID NO: 53034 - DNA, 377 bp, Glycine max
  Clone ID: LIB3167-037-P1-K1-B1
ggaaatttaactgatggaattagtatctatgtttctatttttaaagatgagagtttcgcggtgaggtatgtatgtgctggaggtcttaacatcccaaattctgttcctaatactaataggagtcaatttttcatttgcactgtaaagactccatggctagacaatcgtcacgttgtatttggacatatcattgatggaatggatgttgtgaagacacttgtatcccaggaaactagtaagttagatgtccctcgaaagccttgcataattgttaattgctgtaaactgcctatttaaggttaaatttttacgtggtaattcaacacttttttttttattttcatttcagtttccaatggttctgatttttcccttat

SEQ ID NO: 53035 - DNA, 465 bp, Glycine max
  unsure at all n locations
  Clone ID: LIB3167-037-P1-K1-B2
ntccgattccactatanggagaaagttctaataatctcgatgaaagttaaaaatataagcatttgtgggttgaatgcgaaaattgttatggattaaattataaaaaattttttaaatcaaaaatgaatatttgtgaatactgtggatatcatttgaaaatgggcagttcagatagaatcgaacttttgattgattcgggtacttggaatcctatggatgaagacatggtttctctggatcctattgaatttcattccgaagaggaaccttataaagatcgtattgattcttatcaaagaaaaacgggattaactgaggctgttcaaacaggtactggtcaactaaatggtattcctgtagctattggaattattgattttcagtttatggggggcagtatgggatcccgcattggtgagaaaatcaccccgttggtagaatttgctattatcaacttttaccttt

SEQ ID NO: 53036 - DNA, 466 bp, Glycine max
  Clone ID: LIB3167-037-P1-K1-B3
gaattcgggccacgcgtacgatcgagataactagaaacagcgtgatgaaaatgaaggtccttgatttcttcgttgctacaatggtggtggcatggcaatgccatgcgtacgatatgttccctctccgaatgaacactggctatggtgcccgtactccggaggtgaaatgcgcaagttggaggcttgctgtggaagcacacaacatctttggctttgagaccattcctgaagagtgcgttgaagcaacaaaggaatacatccatggcgaacaatatagatcagactccaaaacagttaaccaacaagcttacttttatgccagaaacctcgaagttcattccaaggacacatttgtgttcagtatagatggcaccgtactctctaataattcatactacaaaaaacatggatattgggtggggaaatttaactcgaccttggatgatgaatgggttaacaagggcaa

SEQ ID NO: 53037 - DNA, 288 bp, Glycine max
  Clone ID: LIB3167-037-P1-K1-B7
ctttcaccgcagtgttagggtttctgtagcctccttctcagaaagagagggaaatgggtgccaggcatcctagtacgggtttgtttgttggattgaacaagggtcacgttgtcaccaagaaggagttgcctccacgcccttcagatcgtaaggggaaaacaagcatgcgagtgcactttgtgaggaacctcattcgagaggttgccggctttgcaccttatgaaaagcgaataactgagttgctcaaggttggaaaagataagagggcactgaaagttgccaagagaa

SEQ ID NO: 53038 - DNA, 409 bp, Glycine max
  Clone ID: LIB3167-037-P1-K1-B8
gcgatcactcgtacacaccacgcgtccaggtcggatgctctatgaatacgactccaccccagtttatggagctcctcgataacgtgcttgcatgttaaccacatcctagtattagcactactctaatttgacggctccttcggggtaacctgctattgattgtctcgtgttctgtactgctttaaattatgaacatcaaaatataatttttcttaaagacatgaactacatggatcctattgaatttcattccgaagaggaaccttatcaagaacgtattgattcttatcaaagaaaaacgggattaactgaggctggttaaacaggcactggtcaactaaatggctttcgcgccgctctcggtaatatggcagtctacactaagcatggctatttggtggcccaatta

SEQ ID NO: 53039 - DNA, 460 bp, Glycine max
  Clone ID: LIB3167-037-P1-K1-B9
gtagtgtgtggttgaaagttaagaagtagcaaagatgtttccattcgggcacaagggtgaaaagataaaggggactatggtggttatgcagaagaatgtgttggatatcaacagcatcaccagtgttgacgggatcgtcggcaccggcttagacttcttaggcagtgcactcgatacagttacttttttagcctcctccatctccatccaacttattagtgctaccaaggctgatggtgggaaaggaaaagttggaaaggctacaaatttgagaggaaagataacattaccaaccataggagctaaggaagaagcatacgatgctcaatttgattgggacagtgacttcggaattcccggtgcattttatattaagaacttcatgcaaaacgagttctacctcaagtctttaattctcgaagacattccaaaccatggaaccattcacttcatatgtaac

SEQ ID NO: 53040 - DNA, 447 bp, Glycine max
  Clone ID: LIB3167-037-P1-K1-C1
ttttacggtggaaatgatgcctctggaacaatgggtggggcatgtgggtacgggaacctatacagccaagggtatggcgtgaacaccgcggccttgagcacggcgctgttcaacaacgggttgagctgcggcgcgtgcttcgagataaagtgcgaccaagatccgaggtggtgcaacccgggaagcccttccatcgtcatcaccgccacgaatttttgccctcccaactttgcccttcccagcgacaacggcggctggtgcaacccttcttggccccactttgacctcgccatgcccatgttcctcaagatcgctcagtataaagccggcatcgtgcccgtcagttaccgccgggttccatgcagaaaggtcggtggaatcagatttacgatcaacggttttcgttacttcaacttggttctaatcaccaacgtggcgggtgcaggg

SEQ ID NO: 53041 - DNA, 438 bp, Glycine max
  Clone ID: LIB3167-037-P1-K1-C2
cccacgcgttcggataactagaaacagtgtgatgaaaatgaaggtccttgttttcttcgttgctacaattttggtagcatggcaatgccatgcgtacgatatgttccctctccgaatgaacactggctatggtgcccgtactccggaggtgaaatgcgcaagttggaggcttgctgtggaagcacacaacatctttggctttgagaccattcctgaagagtgcgttgaagcaacaaaggaatacatccatggcgaacaatatagatcagactccaaaacagttaaccaacaagcttacttttatgccagagacctcgaagtccatcccaaggacacatttgtgttcagtatagatggcaccgtactctctaatattccatactacaaaaaacatggatatgggggtgggaaattaaactcgccttgtttgatgaatgg

SEQ ID NO: 53042 - DNA, 423 bp, Glycine max
  Clone ID: LIB3167-037-P1-K1-C3
ggccactgagatgatggggccaacaatggtggcagaagcatgaacttgtgagtctcagagccaccgtttcaaggggccatgtttgagtgacaccaactgtggctctgtttgccgaaccgaacgtttcactggaggacactgccgtggcttccgtcgcagatgcttctgcaccaaacattgttaattttaaaaaattaattaagagtgctttgatagaagatgatagatctatcatctttctactcgtgttgttaattaaccactttgtgtttgagaataagggttacccattctactatgggtttctttgtttgcctcttattttatctagttagagatccttttatgaaacgagtgatcagtgtgaaggaattatgttactctgtgttgtaaatttaaaattattctaggtaaaaaaataaa

SEQ ID NO: 53043 - DNA, 459 bp, Glycine max
  Clone ID: LIB3167-037-P1-K1-C7
ctctgtctgcttcttcactttctctcgtttcaatctaaaaaaatcatgggcagaaaattcttggtcggtggcaactggaaatgcaatgggaccactgaggaggtgaagaagattgttactactttaaatgaagctaaagtccctggagaagatgttgtagaagttgttgtgagccctccttttgtgttccttccttttgtaaaaagtttgctgcgccctgatttccatgtctcggcccaaaattgttgggttcgcaaaggtggtgcttatactggagaggttagtgctgaaatgcttgttaatttgggaattccttgggttattattggtcactctgaacggaggcagcttttgaatgaatcaaatgagtttgtgggagataaagttgcctatgcacttcaacaaggtctgaaagttatagcatgcattggggaaactcttgaacagcgtgaagctggt

SEQ ID NO: 53044 - DNA, 169 bp, Glycine max
  Clone ID: LIB3167-037-P1-K1-C8
cccacgcgtccggacattcttggctagctctgcacttcaatcctttatttgtacaatgctatggccaagtcaataccatgcatcttatctatgtgtgtcattgaacgaagtagttgcgtgaaaatgatgcttgtactatgaataaataataaaagaactttatcatttc

SEQ ID NO: 53045 - DNA, 445 bp, Glycine max
  Clone ID: LIB3167-037-P1-K1-C9
gttgataatagagacaaggcaaaagtagtagattttagttcttctctgtcaaaggaagacaaaagattgaacaatatgcaccaagattttgttcttccctctccaaaagaaatttctgtgtgcatgacaggaaacagtacaagtagttctagaaccttgaagttgagccgaagtagaagttgtatagcaagtatcatgaggaatttatcttcagattggtttgaagatgaaaacgtaattcaaaacactcctccaatggggaatgaaaaaaccttcccttgaagaccagaaggctttccgaagaacatttatgcactaaattacaatgccaatgcagagaggctttcatgtaatggccatgggaattctgtgcaaaattcttctgttcatgatgttcagaatgtgaaatcctccactaacaaggaaagagagggtaatggtccct

SEQ ID NO: 53046 - DNA, 349 bp, Glycine max
  Clone ID: LIB3167-037-P1-K1-D2
cccacgcgtccgtccacgcgtccgaagctgcacagcttgtcaccgacatccgcaagaggaagggcttgaaggaacagatgactcctctctccgagtttgaagacaagctttaaattgtttgaactatttaacttacttttgaacttagccgaatttatttctcatatgaacaatgttactttagatttaagttttgtcgagttttgtttgtggttttgtccgtgaatgttgtacttctgttatttggtccttgcatcggtgtattttttatccataggattttgcatcggtgttggttcgaactatttgggaattttgcttgaaagataagatagtagtattttccatt

SEQ ID NO: 53047 - DNA, 438 bp, Glycine max
  Clone ID: LIB3167-037-P1-K1-D7
taggttttcttcaacttgctggtggaactaacgctcacacaattgatgggttgaaaaaagagggactctttcaaacaactatttctgaatacttacatgatgatacgtcaacaacaagctcatctgattcatcacatgctttaattagcggcattgcttatggtggctacgcacggaagattgttggaagaatattgagatcaatgcaatcccaacatggtgcagctgcttcaattgaggaacatccccagcatctcttgatggctcttaaggaagcacttgcattggtggggcctattaaatgtctatgattgatgacaatttcacaatcacccttgatggttgtatttgcaagtgtagctacctaggaagaatagaaacttgttagaaaatagtaataattgaggacaattggatcatatatggctgttaataatg

SEQ ID NO: 53048 - DNA, 406 bp, Glycine max
  Clone ID: LIB3167-037-P1-K1-D9
cactattggagctgcacacaaggagcgttctggatttgagggtccctggacctctaatcctggtattttcgacaactcatacttcacggagttgttgagtggtgagaaggaaggtctccttcagctaccttctgacaaggctcttttgtctgaccctgtattccgccctctcgttgataaatatgcagcggacgaagatgccttctttgctgattacgctgaggctcaccaaaagctttccgagcttgggtttgctgatgcctaagcaacgtttaggggattgttgaagaggcatggtgcccataatatttctctaaaaaattggatggtcatggtttttaatgccaatgtgggttccccagattttagatagcttttgaatgtattttgctggacgtgacgatga

SEQ ID NO: 53049 - DNA, 234 bp, Glycine max
  Clone ID: LIB3167-037-P1-K1-E1
cccctaaatttttcctcttcttaaatttaagccctccatccaccataaacaccagcagtgttagccctaactcacaaacccatttttttcaagttttagcaccacttttgatgaagtcgtcacaaaagcaactgttttggctaaattattagtattattgttggtaattttttacagggatggaggatataacaccagtaccagcaacagctacaacaacagccaaaaacgcaa

SEQ ID NO: 53050 - DNA, 242 bp, Glycine max
  Clone ID: LIB3167-037-P1-K1-E2
cccacgcgtccgggacaagatggatataatgtacaaatcaatttgacattatcttaatcaagtgtgtgggattatttctcttataaaaatcaattttacttttttggtataccatgctgattccaagtccaagagaagggtaccatcaagaatataggaaagtgttatttaataggtgagtttcagcaaaattgcagatgtgtatgatagtgccaattattatattttcaattattgatgga

SEQ ID NO: 53051 - DNA, 491 bp, Glycine max
  unsure at all n locations
  Clone ID: LIB3167-037-P1-K1-E3
cgcgtatcgagagtagtccaagtaaccactattcatctgtgacagtatgtgtatcagagcgttccagcnaggtaggaattgagaaaagcacatgataagtgttttcattgagcccacttcatctgcnnccttgtggaatatatcctcgtagaaagagcacaatggtggagcatcanatcttcagttttgtcccctgcgtcttattactttgccggttttgtggtgatatggttcaagctgggagttctgccatggatgtccgtgacagattaagaggattgtctgaacatgagagtatttgcggttctaggactgccccctgtgattcttgtgggcgttctgtgatgttgaaggacatggacattcaccaggttgctgttcatcaaaaaggctaattctgatattttcatcttaacagcaacttgtgaaagaatgcatctaggtaataaatagaaaattaaaaggaactggaggaaattgtaagatacaag

SEQ ID NO: 53052 - DNA, 433 bp, Glycine max
  Clone ID: LIB3167-037-P1-K1-E7
aatccacaacattactttgaactgttattctataggaactattacagatgcagtagctgcaaaggctgcgtcgcgagaaagcaagtagaacgaagcaccaccgaacccaacacgttcatcgtgacctacaccggcgaccacaaacacgcgaaacctgttcaccggaactccctcgcgggaagcaccagaaccaagccatccacgacccgtttatccgaacccaatgaatccgtgtcttgcccaaaaaaagaaaacgcatgttcttcaaattccgagctttctccaatgttgtcagtttctgacacgctggaaaacgaggaaacggtctcggccagcgaacccgattgccctgacatggaaattgagccctctgataacgacgacgttttgatacctaacacgggtgccatgttcgacgctgttctcttgggct

SEQ ID NO: 53053 - DNA, 387 bp, Glycine max
  Clone ID: LIB3167-037-P1-K1-E8
aaatcttcaagttttcttgtttttggatctaaaaaactgaaaaattcagcaaattctatgttggttttgaaaaaagattcaatttttatgcaaaagttttgttcctttaggatttcagcatcagtggctacagcctgcatgcttcacggtgcaagcagccggcccgcaaccgcccgcaaatcctctggcctttccggaaccgtccgcattcccggcgacaagtcgatctcccaccggtccttcatgttcggcggtctcgcgagcggtgaaacgcgcatcaccggccttctggaaggcgaggacgtcatcaatacgggcaaggccatgcatgccatgggcgccaggatccgtaaggaaagcgacacctggatcatcgatggcgtcggc

SEQ ID NO: 53054 - DNA, 425 bp, Glycine max
  Clone ID: LIB3167-037-P1-K1-E9
gaagccctaattttttgcagatctggaaatggcgacggcaacataccctccaccgccaccttattacaggctttacaaagattacttgcaagaccctaattctgctcccgaccctccaccacctattgaaggcacttatctttgttttggagccaattacactactagtgatgttctacctaccttggaagaacaaggggtgcgccagctctattctaagggccctaatgttgatttcaagaaagagctgaggtcactcaacggagagttgcaactacatgttttggagcttgctgatattcttattgagaggccttcacagtatgcaagaagagtagaagaaatttcaactgtattcaaaaacttacatcaccttttaaattcaatgcgtcctcatcaggcgagagcaacattgattcatattt

SEQ ID NO: 53055 - DNA, 325 bp, Glycine max
  unsure at all n locations
  Clone ID: LIB3167-037-P1-K1-F11
gataataatagtccttcaagtatgtatgcagcaaataatttagaaaaggtgacagacagggtctagtggatgttaactctccatcaaataggttcgtgaataatttgttctcattgggctgtccattatattgatatttgtagtgtattttgatatttgtttttccttttcatattttacagtgtccacttttgaatatggttaatttctttaaccatcagggatcgactaaattaattttacatccattttattgtttnaaaaaaaaaaaaaaaaaaaaaaaaaaaaaaataaaaattaaaaaaaaaaaaattaataaaaaata

SEQ ID NO: 53056 - DNA, 384 bp, Glycine max
  unsure at all n locations
  Clone ID: LIB3167-037-P1-K1-F2
gtatttttcaagtaacttaagagtttcaaacctaggaagttggaagtcatggcagcaacattgatggcagcaacaagttctggcactcttaaagcaactcctttcctaggccaaggcaagggtgccaatgccaatgctcttagggatgttgtttccatgggaactgggaagtacaccatgggcaatgatttgctgtatggaccaaacagcgtgtaatactggaaacccttgtcagacaataccccttcatacttgaaaggagaattcccaggggattatggatgggacactgctggcttatctgctgacccggtagcattngccaagaacagggcttcttgaggttattcatgggagatgggccatgcttggagcacttgggtg

SEQ ID NO: 53057 - DNA, 306 bp, Glycine max
  Clone ID: LIB3167-037-P1-K1-F3
gggcgccaggatccgtaaggaaggcgacacctggatcatcgatggcgtcggcaatggcggcctcctggcgcctgaggcgccgctcgatttcggcaatgccgccacgggctgccgcctgaccatgggcctcgtcggggtctacgatttcgacagcaccttcatcggcgacgcctcgctcacaaagcgcccgatgggccgcgtgttgaacccgctgcgcgaaatgggcgtgcaggtgaaatcggaagacggtgaccgtcttcccgttaccttgcgcgggccgaagacgccgacgccgatcacctaccg

SEQ ID NO: 53058 - DNA, 449 bp, Glycine max
  Clone ID: LIB3167-037-P1-K1-F8
cccacgcgtccgcccacgcgtccgatgaaacagaaatatctccatctacaaacctgttagttgcagagaaagacaccccatctccaacctcggtgctatctacggttggttcggaagcatttgggtctcaattttcagagcagactaacagatgcctttcaccaaactcttgcaccactgatattcactcagtcagcttatcacctgctgaaaaggaaaatgattgcatgacatccaaagcatccgaggaggaagagaaagcatcaccagcttcacttcctttatccactgtttctaacccaaacatgtgcatgaagcctgagtttagttccaaggacactttcatagaagatgctgccaatatgccacaaaccactagtattaagctttttggaagaacggtctctatggtaggttatcagaagtcactgaacatagatgatgatgat

SEQ ID NO: 53059 - DNA, 380 bp, Glycine max
  Clone ID: LIB3167-037-P1-K1-F9
cccacgcgttcgcccacgcgttcggagcaccaaaccaaaccacattgtttgcaaggcacaaaagcaggttgtccaagagggtgaggacactactaacattgtctctcgcaggttggccctcactgttctcattggtgctgctgctgttggctctaaggttgcacctgctgatgctgcctatggagaagctgccaatgtgtttggaaagccaaagacaaacactgacttccttccatacaatggggatggattcaaactctcaattccctcaaagtggaacccaagcaaagaggttgagtacccaggtcaggttcttagatatgaggacaattttgactcaaccagcaatgttgctgtcatggtcactgcaactgacaaga

SEQ ID NO: 53060 - DNA, 207 bp, Glycine max
  Clone ID: LIB3167-037-P1-K1-G1
gtttcaagggttgtacttgttcctttcgttttaaatccttggatggttgatgatcatgaagttctctttaaagttaaaaaaaaaaaaaaaaaataaatatattaaaaaaataaaaaaaattttatttaattaatatataaaattaatattttaaaataaattttataattttattatttataaataattattttaataatatataaa

SEQ ID NO: 53061 - DNA, 434 bp, Glycine max
  Clone ID: LIB3167-037-P1-K1-G2
cccacgcgtacggctattcacatttaaaaggttattgttttgttttaagactggcttttaggatcctgtttgataatcagtatgtgaagtgcatttgctctccaaaaaataatcactcttgtttgtgatatgatttctatatcctcattcattttcccctataaatattggatatcaggctggatagagtgggatggcgagaggattgagtttgataatgctccatcttattcagaaaagaactggggtggaggattcccaagaaaatggttttgggttcaatgtaatgttttttgaggagctagtgttgaaattgctcttacagcatcttgtgttttgaggtaattttttggtattacctagacctttgtatattgctttattgattagtattttataattggtgtatatttttagatatatgtgctcttatt

SEQ ID NO: 53062 - DNA, 418 bp, Glycine max
  Clone ID: LIB3167-037-P1-K1-G3
catccgcgatttctcgcaagggcttttcccccttctgaaacagcttcactttcttaaagagtttctgtagttggggtggctagcaatggaagttttgctgccaaaacttccttctttcaaatttccaagtgccacttattgctgctcgatcactagtaggagctcttcatatgtcagatttgggttccgtcgtgtatctgtttgtgcatcaactgtcaatgaaacagtagctgaacctacagttggttcctcttctttgggtcactccacgcgaccccatttccctatacttcaccaggaagtaaatggctcaaaacttggttacttagacaatgcagcaacttctcagaagcccaccactgtgttgaaggcattgcaaaactattatgaagcttacaattcaaatgtgcattggggc

SEQ ID NO: 53063 - DNA, 354 bp, Glycine max
  Clone ID: LIB3167-037-P1-K1-G7
cggacgcgtgggcaaacacaagaattcttttgtctctttcttatcagtattttcttcccctgcgttaaagttaaagttgcaattcctctgtctgttccttcaattcttcaaatcccgaaattgtcatttttaatctcgctgcaaattgcgctcacgattctttgctttccttcgaaactctcccaaatcccacttctttctctctcataaataaattcgccacctttgtatttttgcgtaactgctctgcaccttattgattcttctctctctctccattctccaattctccatttcgatctgcagctccccgctttcaaagctctgaaatttccgattcgggatggagaaata

SEQ ID NO: 53064 - DNA, 412 bp, Glycine max
  Clone ID: LIB3167-037-P1-K1-G8
cgagataactagaaacagtgtgatgaaaatgaaggtccttgttttcttcgttgctacaattttggtagcatggcaatgccatgcgtacgatatgttccctctccgaatgaacactggctatggtgcccgtactccggaggtgaaatgcgcaagttggaggcttgctgtggaagcacacaacatctttggctttgagaccattcctgaagagtgcgttgaagcaacaaaggaatacatccatggcgaacaatatagatcagactccaaaacagttaaccaacaagcttacttttatgccagagacctcgaagtccatcccaaggacacatttgtgttcagtatagatggcaccgtactctctaatatttcatactacaaaaaacatggttatgggggtggagaaatttaactc

SEQ ID NO: 53065 - DNA, 268 bp, Glycine max
  Clone ID: LIB3167-037-P1-K1-G9
agagttcttttctacagacttgtcaatcgtatggatctgcatgctcttctcctcctgctgtgggcggtgtcttattgctgctgctgatgaagaaccatttataggagtggatattggaacagatgtatctgatatgccacaccctactgatggatgggctctacttaaagcccaacaaattcgtcatgtccggtcgtatgatgcagaccaagctatgctgcctgcacttgcaaagacaggcattcaggttgactggactgtaccaaat

SEQ ID NO: 53066 - DNA, 120 bp, Glycine max
  Clone ID: LIB3167-037-P1-K1-H5
ttcgagccacgcgtacgcccacgcgtacgtccacgcgttcgcccacgcgttcgagttattctacatacaaaaaaaaaaaggggaggaaaaataaaaaaaaaggaaaaaaaaaaccacaaa

SEQ ID NO: 53067 - DNA, 397 bp, Glycine max
  Clone ID: LIB3167-037-P1-K1-H7
catttctgcattattgtttccttattggaacaaaacagcgaggatctgaatcagggaagtattcaaaggaaacaaaggacgaggaggaagaggtactggatgaagaagatgacgaggagcatgaggagaccttgtgtggggcatgtggggagcactatgcatccgatgagttctggatttgttgcgacatatgtgagaagtggttccatggcaagtgtgtgaagatcactccagccagggccgaacacatcaagcagtataagtgcccctcatgcagcaataagagagcacggccttgatatagttgagaagtgggtcagtcctcaccccttgtaactaaatcatgttggacgtctaacttgttagtggcttaagcttcctttgtcatgccatgatg

SEQ ID NO: 53068 - DNA, 239 bp, Glycine max
  unsure at all n locations
  Clone ID: LIB3167-038-P1-K1-B12
gggcaagcgacgacaaagcnncacaaaaggggcaccaaaaagcaagncacgggccggcggnnaacaacggcgggacggggaaaacccgggcggnacccaacnaaaacgccgggcagcacaaaccccnngcgccagcgggcgnaaaagcgaaaaggcccgcaccgancgcccnncccaacagnggcgcaaccngaagggcgaacgggacgcgcccngnagcggcgcaaaaagcgcggcgg

SEQ ID NO: 53069 - DNA, 463 bp, Glycine max
  Clone ID: LIB3167-039-P1-K1-A1
ctttcattttccctcactttctcgctcgccatacgcccctctctctcctccaatggccgaccagctgaccgacgaccagatcgccgagttcaaggaggccttcagcctcttcgacaaggacggcgatggttgtattactactaaggaacttgggactgtgatgcggtcactagggcaaaacccaactgaggcagaactgcaggatatgattaatgaggttgatgctgatggcaatggaaccatcgacttcccagagttcctcaacctgatggctcgcaagatgaaagacaccgactccgaggaggagcttaaggaggctttccgtgtgttcgacaaggatcagaatggtttcatctctgcagctgagctccgccatgtcatgacaaatcttggggagaagctgaccgatgaggaggttgatgagatgatccgcgaggccgacgtcgatggtgatggacagatc

SEQ ID NO: 53070 - DNA, 408 bp, Glycine max
  Clone ID: LIB3167-039-P1-K1-A11
aaaagggcctgattttctgtttgatattccatgctagaaatacattctggtgaaagcggccggggtacttccaatcgatgcttccaaataaaggttgttgcgcaggatgacgatgcagatgggccaataactaatccagctcaactggctttgatcttttcacacacagaaacatatcctgatgaacctccacttttaaatttgaaaagtttgcaaggaatgtctactgaagatctaaggattttgaaagaaaatcttcaacaagaggcatctgaaaatcttggtatggctatgatctacacacttgttacctcagctaaagagtggttggctgaccggttttgtcaagatgatgttgggagtacttgaagcagagaggcaagccaagaggatgtagtgataccccac

SEQ ID NO: 53071 - DNA, 252 bp, Glycine max
  Clone ID: LIB3167-039-P1-K1-A12
accacccgtccgcacatctttttatacggtatcttcgacacacaagccatgttatttcgcagagggtatgctcgagccttatgctgtatacgcacgcatatgcacaccattcccctgagaggacacgataagcttaccttacaacacatgaacgagcattgagacccaatctagaccagctttttcgatgccacaaacgctaattgatgcactctaagatgtctcaatactcaacgtgcagataaaaccgac

SEQ ID NO: 53072 - DNA, 236 bp, Glycine max
  Clone ID: LIB3167-039-P1-K1-A2
ccggaacggaagggccgacccacgcgaccggccacacgtgctctcacgcgtccgcagaagtttcggctacaggtagagaagatgaagttaaatccagggtgtgttgagcagacgccggacgaacccaaaggctcattttacggcaccattgatcgtgcagtgggagcttatgagcgcccctttgtcagcggagatggggacttagtacaacatgtgggcgaaaccactaccgaggg

SEQ ID NO: 53073 - DNA, 428 bp, Glycine max
  unsure at all n locations
  Clone ID: LIB3167-039-P1-K1-A3
cccacgcgtncgnccacgcgttcgccaaaacatacccactaagatggcttcctttgtatcctggctagtgctgcttcttgcagcccttatcctcatgcctcaagggcttgctacttactacaaaccaattaagaagccaccagtgtacaagcctccagtgtacaagccaccagtgtacaaaccaccggtttataagccaaaaccaccggtttacaagccgaaaccaccggtttacaagccaccatataagaagccaccatacaagaaaccaccttatggaaagtaccctccagtagaggacaacacccatgcctaaagcaagcaatgaggtctattatctacttaataaataagaggaactgctttgtgttttctagcattgtgatttacaacttcgtagcaatgcatattcttgactcttgcatgca

SEQ ID NO: 53074 - DNA, 411 bp, Glycine max
  Clone ID: LIB3167-039-P1-K1-A4
cttcttctattctcacacatacccatctactccttccctcatggctgaacaatctggcagcgtccatttacgatttcactgtcaaggacatcagtggaaatgatgtgagtctgaatgattacagcgggaaggttctactgattgtgaatgtcgcctctcaatgtggtttgacacagacaaattacaaagaattgaatgtattgtacgagaagtacaagaatcaaggatttgaaatcttggcatttccgtgcaaccagtttgctggacaggaaccaggaaacaatgaagaaattcaagaagtagtttgcacaaggttcaaggctgaatttcctatctttgataaggttgaagtcaatgggaagaatgcagtgccactttacaaggttttaaaggagaagaaagggggaatat

SEQ ID NO: 53075 - DNA, 344 bp, Glycine max
  unsure at all n locations
  Clone ID: LIB3167-039-P1-K1-A5
cccacgcgtccgatcaatggcttccttatccttctcctctcccccatctctctcttacgcacgccagagcgcctacacgcgccttattctacgcacccctaactcccttaaactgcgcactccaccccactccctccccgccatccgcgccatcaccctcacccaggacgacctcaagagactcgccgccgacaaggccgtggagtccgtcaagagcggcatggtcctcggcctaggcaccggctccactgctgccttcgtcgtcgccaagcttggcgcccttctcgcctncggccaactctncgacatcgtcggtgtccccacctgcaaacgcacggaggagc

SEQ ID NO: 53076 - DNA, 563 bp, Glycine max
  unsure at all n locations
  Clone ID: LIB3167-039-P1-K1-A7
ggaattggaaggnnccggcccgagcccaccgcggtccgcttcgacttcttcatcccaattttctagntttctccatctgtcacttttttccttaaccggcgaagcgcgatcgcgcgaaaagcggcaccaacgcgtcgagttcccaccccccacaaaccccgtttnncttcaattctttcctctctttcccatcgccacgtaaaaagcgagagcgacatcgaagactgttccccgttctcaatcggaaagcgggaaaaccggtaaccgcgagatgggaccttcttgtctaaccagagtaacctagagagagctctgaaaccagagggatcacatnctacctcttggaggactcgcgtatatatantgctcatcacggcatctatgtcagtgatgacaaagtcattcacttcactagacgtggccaagaagtaggaaccggtactgcactagatcttcttctcattagttcaagaccagccaagtctcgagaaagttgccctacttgtatggcaccccaagaggaacacggngttatctncttatgcctgaactgctttctagct

SEQ ID NO: 53077 - DNA, 225 bp, Glycine max
  Clone ID: LIB3167-039-P1-K1-A8
cccacgcgtccggaataattcgctcatattctcaaagcgtgttagacctcaaaaaaagaagagcgaaaaaaaaaaaaaaaaaaaaaaaaaaaaaaaaaaaaaaaaaaaaaaaaaaaaaaaaaaaaaaaaaaaaaaaaaaaaaaaaaaaaaaaaaaaaaaaaaaagggccgccccttttaaagaatccaagtttacttacccgtccttccaactaaaaaatttttt

SEQ ID NO: 53078 - DNA, 447 bp, Glycine max
  Clone ID: LIB3167-039-P1-K1-A9
cggacgcgtgggcggacgcgtgggcggacgcgtgggcggacgcgtgggtggtcatcaacatatgcggtggagatggaaggaggctacggaggcaattggaggttgaagaaatcggcgacacctttaatcgctgccacccacatagtttgccaccaccggggatgaccatcaccactacaccagccctccaccgcacaatgacttaaccagattcatggccttttgcttgcataggtcctcaacgatgtcgattttacagattccatggctctgatttaggtgggaggaaagagtatttggccattaatgaactttgttaattttctgttcgaggtgaactttgtttgaatcattgttgggataaatggaaagcattgttatgtgtggggtggttgaggttataattatagaatgctctacaaacatggtttggaatacaaataccca

SEQ ID NO: 53079 - DNA, 213 bp, Glycine max
  Clone ID: LIB3167-039-P1-K1-B1
atttctctttcttcatctttaacttcactctcactcttcttcttcttcttcccgattctttctgatctgggctgggttttcagcatacaacaaaattgggtgctttcggttaaactgtgatgtctccgtcagtgctgagcatagttgatgaggagggtaaaagcaatgacatcttcttcaccgcacaatgacttaacccgattcatggccttt

SEQ ID NO: 53080 - DNA, 366 bp, Glycine max
  Clone ID: LIB3167-039-P1-K1-B10
cgtcactagctctgtgcattcttctctcgctctctgccttccatcacactcggcatttcctgtggccaagatagtagaagatggcagacactgaggatattcaacctcttgtttgtgacaatggaacaggaatggttaaggctggatttgctggagatgatgccccacgtgctgtgtttcccagcattgtaggtcgtcctcgtcacactggtgtgatggttggcatgggccaaaaagatgcatatgttggtgatgaggcacaatctaagaggggtattttgactctcaagtaccccattgaacatggaattgtgagcaattgggatgatatggaaaaagatttgcatcataccttctataatgagc

SEQ ID NO: 53081 - DNA, 303 bp, Glycine max
  Clone ID: LIB3167-039-P1-K1-B11
gagacactgaggtcgttggcgagaatgggaagaaagaaggggtatgttgagttcgaggaggggccgccggacgattttgatccggcgaatccgtacaaggacccggtggcgatgctggagatgagggagcacatcgtgagagagaagtggatccaaatcgagaaggccaagatcattagggagaagctccgctggtgctaccgcatcgaaggcgtcaaccaccttcagaagtgccgccacctcgtcaaccagtatctcgagtccacccgcggcatctgttggggcaaggacggtcgacaccca

SEQ ID NO: 53082 - DNA, 295 bp, Glycine max
  Clone ID: LIB3167-039-P1-K1-B12
ccgccaacccgtcgccacgcgtcgcaattgatgtacacaggtagaccacacaatcccaccgggttcgtagcttgaattacacgattcacccgggttctcctcatccacctccagcaaacttgtgatggcacgccttggctctttcaagggaactgtgatgcggtgggtcatggtactaggcggtgcaaatgtgcaggatcacatcttgtgcaggggcttgatacctgttgtggcatggtgggcgctatacttgctttacgccagatagacacgatgctaaggaatgtgtcgatgt

SEQ ID NO: 53083 - DNA, 477 bp, Glycine max
  Clone ID: LIB3167-039-P1-K1-B2
cccacgcgtccgcccacgcgttcgcgacaacatcactcatcagagggaaaagtcgcgcccactgccgccgcgtccaaagatgatcgatgatcaagatctgggtttctttgccaattttcttggcgtcttcatctttgtactagtgatcgcgtatcattttgtcatggctgacccaaagttcgaaggaaactagtaatgcttttaagtttaagatgtaattttgtgttgtagacttgggaatgtgaacgttagcttactaaaacttccataaacatcaaaggagcataacatttcaatttttgctatacttatgcgtgctcccttaagttattttttgctgttaaggagtgtttgttggtaaactaatgaaaatactggattttctttaagattagaggattttgcttgatgatgtgctactatattttgtgcaatcatcatatgagcaatataggttagtgtagtatctattttttt

SEQ ID NO: 53084 - DNA, 450 bp, Glycine max
  unsure at all n locations
  Clone ID: LIB3167-039-P1-K1-B3
ctataagctagtttatcgtgaggagaatatgtagttgtttgttttctttgttgctgcagtaggtttggtagcatggccatgccatggcgcangctaccaaaggttccctctccgaatgaaaactggctatggtgagcgttcttcggaggtaaaatgcgcaagttttaggcttgctgtggaagcacacaacatccgagcctttaaaaccattcctgaagagtgcgttgaaccaacaaaggactacattaatggcgaacaatttagatcagactctaaaacagttaaccaacaagctttcttttatgctagtgaacgcgaagtccatcacaacgacatatttatattcggcatagataacaccgtactctctaatatcccatactatgaaaaacatggatatggggtggaggaatttaatgaaaccttatatgatgaatgggtttacaaggg

SEQ ID NO: 53085 - DNA, 225 bp, Glycine max
  Clone ID: LIB3167-039-P1-K1-B6
tttggttggttaaatatgtttggttaataaggaatggaacaggaatcgggggggttaatggttggccagccaattgccagtgttttgggctgcaaatgtggaattccaatgcaacccaaggctgttaatatgggtgtaaagggtttgcgatcggaagttgatattacagaaggactgctgaagcgttttgtgctggtgcattgccttgagtgtgagagttacttg

SEQ ID NO: 53086 - DNA, 474 bp, Glycine max
  Clone ID: LIB3167-039-P1-K1-B7
cccacgcgtccgaattgcagcggattactgtctgcggtgaaatatcatgtcgaatattactgggtgcgcgcgctttaggccttcgaattcgaaagagaagcaaaatggcaacgactctggctgcattcggaacatagactccgaaactttcattttcaaggacgagaaggatgaagaatttgtgtttagctttgatagagtgttctatgaaaaatccgagcaatctgatgtctatcaattcctagctcttcccatcgttagagactggagctgggaagacatatagtatggaggtggaaaattatcatattaaaaggacctggaatacttgaatgtgaagaacagaacacggggcttctttcaagagttgtagaaggactttttgattccataaattctttggatgaagagaagacatattcaattaaattggcaatgggtgaaatctacatggaaaaaagtagggacttattt

SEQ ID NO: 53087 - DNA, 453 bp, Glycine max
  Clone ID: LIB3167-039-P1-K1-B8
cccacgcgtccggcaaaaagaaagaatcccaggcgaggagaaagatggaggggaaggagcaggatgtgtcgttgggagcgaacaagttccccgagagacagccaattgggacggcggcgcagagccaagacgacggcaaggactaccaggagccggcgccggcgccgctggttgacccgacggagtttacgtcatggtcgttttacagagcagggatagcagagtttgtggccacttttctgtttctctacatcactgtcttaaccgttatgggagtcgccggggctaagtctaagtgtagtaccgttgggattcaaggaatcgcttgggccttcggtggcatgatcttcgccctcgtttactgcaccgctggcatctcagggggacacataaacccggcggtgacatttgggctgtttttggcgaggaagttgtcgttggccaaggcgattt

SEQ ID NO: 53088 - DNA, 468 bp, Glycine max
  Clone ID: LIB3167-039-P1-K1-B9
atcaaagccatggccacctccaacttttctattgttctctccgtctccctagccttcttttgggtgctacttaccaaggcacactcgaccgataccgtttctttcaccttcaacaagttcaacccagtccaaccaaacattatgctccaaaaagatgctagtatttcatcctctggggtgttacaactcaccaaagttggcagcaacggcgtgcccacctcgggatctctcggtcgtgccctttacgctgccccaatccagatttgggacagcgaaaccggcaaggtagccagctgggctacatcctttaaattcaacattttcgcacccaacaaatcaaactcagctgacgggcttgccttcttcttggcacccgtcgggtctcagccccaatccgacgatggatttcttggtcttttcaacagtcccttaaaggacaagtctctccaaaccgtggcgattgagttc

SEQ ID NO: 53089 - DNA, 458 bp, Glycine max
  Clone ID: LIB3167-039-P1-K1-C1
cacaaaagagcactgaccaaaccattttattttatttttgaatcaagggtgagggccttccagggcgtccgcttgtgcttcctctgcaattacagctgttgccatctctacgccgagttccgggcagaagaatggatcaggaggttgttttcttagtggaaggaaattgagggtgaaaaaggagagagcagcaattggaggacgatcgatgggcactacagtgtgcgcagttgctgagcctgacagacctctatggttcccaggcagcacccctcctccatggcttgatggcactctacctggagacttcggctttgaccctcttggtcttggatctgacccggagagtctgagatggaatgttcaggcagagctagtgcactgcagatgggcaatgttgggtgctgctggcatttcattccagaattcctaacaaagattggtgtcttgacactcct

SEQ ID NO: 53090 - DNA, 352 bp, Glycine max
  Clone ID: LIB3167-039-P1-K1-C10
cggacgcgtgggcggacgcgtgggcggacgcgtgggtgggggcactaattactatatcgcaggctcttgtgagtccgtttcttttagatgattctgcagaagatatggatgaaagctgtttgggtgatccaactgggtctggtaacaatttcattggtgaaaatgactgttcaaacaatagttatgacctgcttaaagatattgatccagttgcagcaaatagaatccatccaaataaccatagaaagataaatcaatatattaatttgtacaatcgcactggtgttctttctagcaatatttttcaggaaaggcagcagaaaaaggggtcacgttgataacttacgatatg

SEQ ID NO: 53091 - DNA, 55 bp, Glycine max
  Clone ID: LIB3167-039-P1-K1-C11
cagacacttaactatacacataaacaatttttttctcgcaaccaataattactat

SEQ ID NO: 53092 - DNA, 291 bp, Glycine max
  Clone ID: LIB3167-039-P1-K1-C12
gcacagctaaagcatcaccccaaacggctaaagcttctgactccatacatttgtcactgagtgtatgatactaacaacaacatgcgcttcattcgaagcctacttcaggccactacccctacgccaaccaaagaggaccctcttcaccacgaaggcagtgtcaaactccaagcctcaaatcaatgcatctttgaaggagaaggcagttgccggactcacagcagcttctgtgacagcatctatggtgggtccggaggtggctcatgctgctggatatgagttcttcccttt

SEQ ID NO: 53093 - DNA, 372 bp, Glycine max
  Clone ID: LIB3167-039-P1-K1-C2
ctgatctaagatatgtctacatctgataagtcagaagtggtggaaaggggtgctaaggatgaggaagagccaaaggaagaacatgagaagggtggatttcttgatacagtgaaggatttcattcaagacattggtgagaagattgagggagcagttgggtttgggaagccaactgcagatgtcactgggatacacattccatcaattaatcttgagaaggcagagctagttgttgatgttcttataaagaacccgaattcggtgccaattcccctaattgacataaactacttggtcgagagtgatgggaggaaactagtttcgggattgataccagattcgggcacaattcatgcacatggagaggagaca

SEQ ID NO: 53094 - DNA, 430 bp, Glycine max
  Clone ID: LIB3167-039-P1-K1-C3
tccaaatgctgcctaaaccttaatgctttctttttccatcatggccttgattttcttgttatggccagtcccctcggaacggtagttaacgagaagagaaaaacaatggatgaaactaaaattctcttagagttgaagtccgtttcgtccttatgtgttcatagcttcatcaaccttctatgcgaagaaactatttcttttctctcagggttctcttcagatcctctgtttcattgcatcgtggcgttttgcaccttggttttcctctatttgccacaccttttcttgaaaataattctatcttcagtgcccattctcactgcgattcttcttctctctattctccgtctcggtgcaattcaaaggttacaacatgaaagaagggagaatcatgtgaaacacgaaagacaacccatcgtttacgaagaaa

SEQ ID NO: 53095 - DNA, 324 bp, Glycine max
  unsure at all n locations
  Clone ID: LIB3167-039-P1-K1-C4
cccacgcgtncgaccaaatcatattaagccatggccacctncaacttctcaattgttctctcgctggccctagccttctttctagtgctactcaccaaggcaaactcaaccaacaccgtttctttcaccgtcagcaagttttccccacgccaacaaaaccttatcttccaaggagatgctgctatctcaccctccggggtgttacgactcaccaaggttgacagcatcgacgtgccaacgacgggatccctaggacgtgccctttatgctaccccaatccagatttgggacagtgaaacaggcaaggtagctaggctggctaca

SEQ ID NO: 53096 - DNA, 272 bp, Glycine max
  Clone ID: LIB3167-039-P1-K1-C5
gttggctatgctattgcattgtgtggagttgtgatgtacaattacataaaggttaaggatggccgggcctttcaattgcctgtggaaagtataccggatcggatcacaaaggactggaaattcgagaagaagtcatccgatatatatgtgccagataacattggtgacaatgagggaagcagtggaggtaatggtactgcttctgatatgaaaattgatgaagaaacaccactaatttcatcatcaaggttatctcatattggacgaacaca

SEQ ID NO: 53097 - DNA, 310 bp, Glycine max
  Clone ID: LIB3167-039-P1-K1-C6
tccgccaacccttccatttgaattttttgaactctgttttgtcaggacccgagaattgacttaaggccgcacctttaacaatgaagaaggcaaaggccaaggtagcaccaagggcctcaaaagaatcactgaagcccgttgatgaccgaaaggttggaaagcggaaggcttccggtaagcctgggagaagtagtgcaccaaagaaggagaagaaggccaagaaagaccccaacaagcctaaaagaccacccagtgctttctttgtgttccttgaggagttcaaggaagacctttaaggctgagaatccta

SEQ ID NO: 53098 - DNA, 473 bp, Glycine max
  Clone ID: LIB3167-039-P1-K1-C7
cccacgcgtccgcccacgcgtccgcccacgcgtccgcccacgcgtccgcccacgcgtgcggggtctcatagctgtagcggcgacactaagatcggagaaagaatggcgaaaacgacgtcgttgctgctctttacactgctcctcttcggaaccctagctctcatccaggcgaagaaatcgaaggaggatttgaaggaggtgacccacaaggtttactttgatgttgagattaatggaaaagaagcaggtcgtattgtaatgggtctttatgggaaggctgttccaaaaactgcagaaaacttccgagcactttgcacaggggaaaagggaactggtaaaagtggaaagcctctccattacaaaggtagctcattccatagaattattcctagctttatgcttcaaggaggtgattttacacaaggaaatggaatgggtggagaatcaatttacggagagaagtttgctgatga

SEQ ID NO: 53099 - DNA, 264 bp, Glycine max
  Clone ID: LIB3167-039-P1-K1-C8
catgaattcatcattgagcaatacgaagactatagaggttattcaaggttgtaagaaaatcggtgtaaaagctgcattatactcttgcgcttttggaagttcttcatccatccatcccttggagagaaaaaaaacataacctccgtttctactatttgtcctgcattggagattattcttaaaccttacactttcttctatatcatctctgaacttacaatatttcggctgtatatttaatctctcttgaacttttatcatttt

SEQ ID NO: 53100 - DNA, 470 bp, Glycine max
  Clone ID: LIB3167-039-P1-K1-C9
gtagttgagaactaagaaggagaagcataatggcttcctcaatgatctcttccccagctgttgccactgtcaaccgtgccggtgccggcatggttgctccattcactggcctcaagtccatggctggcttccccaccaggaagaccaacaatgacattacctccattgctagcaacggtggaagagtgcaatgcatgcaggtgtggccaccagttggcaagaagaagtttgagactctttcctacctgccagaccttgatgatgcacaattggcaaaggaagtagaataccttcttaggaagggatggattccttgcttggaattcgagttggagcacggtttcgtgtaccgtgagcacaacaggtcaccaggatactacgatggacgctactggaccatgtggaagctgtctatgtttggttgcactgatgcttcttaggtgttgaaggagcttcaagaggctaagact

SEQ ID NO: 53101 - DNA, 413 bp, Glycine max
  unsure at all n locations
  Clone ID: LIB3167-039-P1-K1-D1
ggaaagaccacattgctccactttgtggtccaagaaatcattaaatctgaaggtgctggagctgaggctgcaaatgataatgtgaagatggattccaaatttaatgaggatgagtttaagaagcaaggtttgcgggttgtggcagggctcagtagagatcttagtgatgtaaaaaaagcagcaggaatggattcagatgtcttgagcagctatctttcaaagcttgaaacaggccttgataaagtgcgattgggtttgcaatatgaaaagccagatatgcaaggcaatttctttaactccacanagctatttctgaaatatgctgaagatgaaattgtaaggattaaagcagatgagagaaaagccttgtaccttgtaaaagaagttacagagtactttcatgggaatgcaac

SEQ ID NO: 53102 - DNA, 355 bp, Glycine max
  Clone ID: LIB3167-039-P1-K1-D10
caaagcattgaattcaaaaacttaagttcattccttgcgttttgctttcttcctcaaaaccaaacatgtcgaacacatgcggcaactgcgactgcgctgacaagactagctgcaccaagggaaacagctatggtgttattgtagagactgagaagagttacatcgagactgttgtcatggatgttccagcagctgagcatgatgggaagtgcaagtgtggcactaactgcacttgcacggactgcacctgtggccattaaggaatatgtatgaaaatgtaattgccatgtgtttggcaatacaaatatccaaataatgtaatcttcgtatgaataaatgtgtgtgcttgtatcct

SEQ ID NO: 53103 - DNA, 418 bp, Glycine max
  Clone ID: LIB3167-039-P1-K1-D11
cccacgcgtccgtccacgcgttcgcccacgtttccgtgaaacgcaacaacgcatactaacagcaaccaccaccaccaccacaacaacaacgtttgtgtctggtcgtgttgtgttgttagggattcatggcaacaataaacccttgattcctctccccattctcccaagagaagggccattttgttacagtgttggacacttgcaaatggatttagaagacaagttcctcgctaaagtttctggtgttcaaagcctttcatccagtgcacaaagtactccagaaaaaaatggccattcagatgatgcttcaagaagttcagaacttcttcaggagttcctaaaatctggtcctaagaaggaaattttacgaacttgctttgataaggacaaaaagaacatttctttaaaaagcaagatg

SEQ ID NO: 53104 - DNA, 376 bp, Glycine max
  Clone ID: LIB3167-039-P1-K1-D12
ataaacgggtggtgcctctcttccatctccttagccaaaacctctctcaggaaggccacatgacgcccttccgtcttcgcaacccttaacactccttcttctccttcctcttcatcttccttcccctctctcattcaagacaggcctgtttttgctgcccctgcccccatcatcaccccaactgtgagagaggatatggcaaaggaatacgagaaagctattgaagaacttcagaaattgttgagggagaagagtgaactcaaagcgacagctgctgaaaaagtggagcagataacagcttctctagggacatcatcatctgatggcatcccatcatcagaagcctcagacaggatcaaagctggtttcattcact

SEQ ID NO: 53105 - DNA, 230 bp, Glycine max
  Clone ID: LIB3167-039-P1-K1-D2
cccacgcgtacgtccacgcgttcgcccacgcgtgcgtccacgcgtccggtgagctataagctagttgatcgtgaggagaatatgaagttgtttgttttctttgttgctgcagtagttttgatagcatggccatgccatggcgcaggctaccaaaggtaccttctccgtatgaaaactgcctatggtgagcgttcttcggaggtgaactgctcaagtttaaagcttgctac

SEQ ID NO: 53106 - DNA, 411 bp, Glycine max
  unsure at all n locations
  Clone ID: LIB3167-039-P1-K1-D3
cggacgcgtgggcggacgcgtgggctctccttctcgatcccaattccactagggattcaatggcgatgcgattccgagcttgttagatccacgacaacgtttcgtttcccagattcttttgtaaaaaaaaataatcttcctttgcccaacaggtaagttggaaaaaaatggaccatgacaagactgggtgccaagctcctcctgaaggtcctatattgtgcatcaacaactgtggattttttggaagtgcagctaccatgaatatgtgttctaaatgccacaaagacatgttgctgaaacaggagcaggccaagcttgcagcatcatccattgggaatattatgaatgggtcttcaagcagcactgaaaaggaacctgttgttgccgctgctgctgctaatgtngatatcc

SEQ ID NO: 53107 - DNA, 374 bp, Glycine max
  unsure at all n locations
  Clone ID: LIB3167-039-P1-K1-D4
gagaaatccaagttgaacaaagagaagaaccgtaaagaaattgagaacaaatactgcatacgtggggcagaatggggagttggagattgttcaactgcgggaatgtctccagatgagagggagaaattcatagcaatgttgaagcagaaagctggagaagagtaatatgatgatgatgatgatgccactagagcatagagaaaaaaataataaaaaaaaaaggtttcttataacttatgaataggtgcaactntatttggcatttagaatgggcactaggtgaagtaacaattaggcctcttgcgtagtttcaaatttttggttttgaaacaattacactttgattcaatttttttttatgtaataattaataa

SEQ ID NO: 53108 - DNA, 339 bp, Glycine max
  Clone ID: LIB3167-039-P1-K1-D5
cccacgcgtccggcttgtttatgtcatggcagctgagggaatcttcgcaggattcattaatggggggtattatggtgaccctcataacacgctggtctattggatccagaaacatgtcttcattaaggtttggcattcaacgagagtaggcatcctgctatatgtgatctttgcggagatcctattctgggccgtcgttgcaggcattttgcaccgattgggcatatattggaagctttgaatttttttttaaaaatatttgcattaatttttactgtgtatccgtgctgttgctctatattcaatttggggaatgactgaatagccatttcgcttatc

SEQ ID NO: 53109 - DNA, 392 bp, Glycine max
  Clone ID: LIB3167-039-P1-K1-D7
ctcattcaacccatttttttacaccaacatttttacaaacatcatcacattaatcatggacgcgtttttttataatatgacaggatctcattatattctatatttaataaatataattatgcataatagcattcaataaatctagaacttgcattcttcattatttgcatctatctgaaaacctattatcttcataaaagcaatattttttttcacaatctatatatttttcgacagaatttctaactttttaaaacttattaacaattccagaatactaattataaatactttatattctattatttatattaaaaaattattttacttcttattaacttattaactattacaacatatctccttctttgtatacctttcttttaaacatt

SEQ ID NO: 53110 - DNA, 392 bp, Glycine max
  Clone ID: LIB3167-039-P1-K1-D8
ggccaagccaggtaagcacaaccaaagcaacaccccaaatggcttcagcttctgttcccatggcgttgtcactgagctctgttaccaacaacaacaagccttcatccgaagccttcttcaggccactacccctacgccaaccaaagaggaccctcttcaccacgaaggcagtgtcaaactccaagcctcaaatcaatgcatctttgaaggagaaggcagttgccggactcacagcagcttctgtgacagcatctatggtggttccggaggtggctcatgctgctggatatgagttctccccttccctaaagaactttctactcagcatctttgctggtggggttgttctagcagccatatttggagccgttattggggtttccaactttgat

SEQ ID NO: 53111 - DNA, 444 bp, Glycine max
  Clone ID: LIB3167-039-P1-K1-D9
gtcgcaaacaacgctgcacgctttcgtcgccaaaaaccttggatgtggaatggcagaaggcaggtgtctcccatgttcaggtgtttctggaagaactgctgctgtatattcctactcttctctaggtcatcgcagaattcattcccatgtccaagttagaggactaaagtgtggctttaggggtgcatcttttgtatgtgaagcaaagaggaacccagatttctcaaggcaaaacaagcatgggtcctccagaagcagaaatcggaatagtgatgggagagacagctttgagagctttgacgacgatatgttttctttaaaaaatggaccacctgtgtctctttcaacctcaggaaaattccaggccacttcagcccctggtcctagggagaaggagattgttgagctatttaagaaggtccaggctcggttgcgtgagagggc

SEQ ID NO: 53112 - DNA, 271 bp, Glycine max
  Clone ID: LIB3167-039-P1-K1-E10
gagagttagtctatcgagcttactagtatcattcagatacaaaggaatgaacttgtgcgtgcgtgttgctacaacagtgacagtatagcaatgccatgcttacgatatcaatgcgtatgaaaataaacactgtttatcagagcctacctcaccacttgcagagcacaggttgattgttgctaaagaacgcacacaatagggagctggagacacataatgaagatatcatgactgacatacggatgctatcaaagctgcattgtatgaacct

SEQ ID NO: 53113 - DNA, 208 bp, Glycine max
  Clone ID: LIB3167-039-P1-K1-E11
tggatatggtggtgacggcagatcccgctactcgagaggaggcggtgcttcggatggagccggctgtatgaattaggattaggttttttagtacattaataaaatccctaacggctactaccaaatactccgtgtacctgcgagactcgtcacgagctgaagcgagtcttcagtctgttctacgccaacagcatctgcaagatcttcg

SEQ ID NO: 53114 - DNA, 286 bp, Glycine max
  Clone ID: LIB3167-039-P1-K1-E12
cccacgcgtccgtgaaaaaccagtttctctcaagcctgagcacattcggaatgagaaactgagggttcttgaatcagtacttcctattaaagatgatgaggttgttctaggacaatatgaacgctataaagatgatccaactgtgcctgacaattcaaacactcctacttttgcaactgttattctgcgagtacacaatgaacgatgggagggtgctcctttcatactaaaggctgtgaacgccttaaatgcaagaaaggcagacataccgcttcaattcaaggat

SEQ ID NO: 53115 - DNA, 453 bp, Glycine max
  unsure at all n locations
  Clone ID: LIB3167-039-P1-K1-E2
accaccgcgtnccgccctctggaaacacttttttctttccttttcctcttttttacaccctttcactcgggagggcatattcgccacgaggattttcggttataatgacctgcatctcgggttgacgtggttcgtcccacaacgatgtccacacgctacccttttcatncccaatgggatcaccgccatgncccgggttatggcccttctctgtggctgggagaaataaacaagggatagcatttcgtcaagtggaaagaacgagttttttgtctcctatattaaaatgcaatagacaacttcagttggtcaaaagtgccatggatgcttcatatggtgatatgtcaaatgattctgctgctgttttttcaagaattaatgtgagggacccatataaacgacttggaataagccaggaagcttttgaagatgaaattcaaggagcaaggaact

SEQ ID NO: 53116 - DNA, 433 bp, Glycine max
  Clone ID: LIB3167-039-P1-K1-E3
accacgcgtccgaagctctcttctacaactgttgttgaaagaagtagcagtgatcatgatcaacaggcttatcaaccaactaatcaaactctcacattaatcttcaacgaaacatctgatcataatgtatatgcaccatcaccacctcctacttctgctcttgcacctcatcaacccacgtaagatccagatctaagcaccccaattgctcccacatcgaatccctcaagaacagcggcggctcaaacgacaacaacaacaacctcgacgccgtcgatcaggtaccgagaatgtcttcggaaccacgcggcgagcatggggagccacgtggtggatggctgcggcgagttcatggcaagtggggaagaaggcacgccagaatcactaagatgcgcagcatgcgagtgccaccgcaactttcacagaaaagaag

SEQ ID NO: 53117 - DNA, 448 bp, Glycine max
  Clone ID: LIB3167-039-P1-K1-E4
gtagagtatggctgtgaatggtgcgagcgtgatgcttcggtgcagcgtggctgcgaggttggtagtgacggtggacagggtggcgccggcggtgcctcaggtgtgtgggcgcggggacaagaagacgaagaaaggaaagaggttcaagggatcgtacggtaacgctaggtcgaagaaagagaagatgatagagcgcatcaaggacaaggtcgaagttcccaggtccactccttggcctctccctttcaagctcatctgattccctattttattctaggctttccgctcactcatatcacatatctactctctcgttaccattttctattcaaattcgatttcacttttatgctctctctttggtttattatcaaaacaaatagtaggaatttgcaattataaagttcccataaactatatgtttattcaaaaggcttggtagtttgta

SEQ ID NO: 53118 - DNA, 392 bp, Glycine max
  unsure at all n locations
  Clone ID: LIB3167-039-P1-K1-E5
ggagactataggatacggcgtttttattccgaacttgatactcttgcggaagcggaattccaccccggtcagcnnaatggcatctacctctcttcgctttgcccgtcgatgtgttcctcctcttcttctatattttctacttccgtcaaattctccttaaacccgaataaaatttctcttccgttcgccggaaacaaaaaacctctttcggctccaattcgaaggcggntcaatgtcattgctatggctccccctaaacccggtgggaaggccaagaaagtggttggaattataaagctggctctcgaagctgggaaggctacacctgctcctcccgttggccctgctcttggttccaagggtgtcaatattatggcttttctgtaagggat

SEQ ID NO: 53119 - DNA, 451 bp, Glycine max
  Clone ID: LIB3167-039-P1-K1-E7
cccacgcgtccgagagtggattcttggtgactttcttgaccagaaaagtagcaaccgcagcaccaaagactttgctttgcatctatcgaattctaatccaattctctctgcatctacatatacaatatcataatcgttcataagattgcatttgcattgatttcaaaaatgcagatcaggggatcgagtcacagactctccagtatgggcaataatcgatcccgcattcccgcgctcctcatctccatgttcgccactttcgcttctatctacgtcgctggaaggctgtggcaggacgcagagaatcgcgtttatctcatcaaagagctcgataggatcactggccagggacaatctgctatatctgtggatgatacattgaagatcatagcctgcagggaacaacataagaagctcgatgcaattgagacggaacttgctggagctagac

SEQ ID NO: 53120 - DNA, 355 bp, Glycine max
  Clone ID: LIB3167-039-P1-K1-E8
cccacgcgtacgaccacgcatccgaccacgctttcgagcgcatgctaaagcaagctgtggcgagaagatatgcacttgctgaggctcatcgtaagtatatacactctctgaatgcaggaacagcggacattaagctctttgatgcacgccactcttcaccttcatgaactttcctcataactttccatgctccttgcaccttattctgcttattcttctcattctcatcccactgagaatgacataaccaaccccatgttgctgcagcagacaccctcataaaccaagcatgaagccattgcttgagactcatgcatctcttcaacaacctcagagtattctgaggaagagagtg

SEQ ID NO: 53121 - DNA, 278 bp, Glycine max
  Clone ID: LIB3167-039-P1-K1-E9
gaaagtgatgctcttggacataaagttatggaccagagacaagggcatgaaagtttacttgctgttgctgggacagttacccttgaggaggtcaattctgttggtgccaaggtgttagaatttatagctgattttgcaaagcctactgcaccacttcctgcagcaattgttgcttgtgttccaaaaaaagttcacaatgagggagctggtgaaacagaattcaagatatcatcaactgaaattacggatgctatcaaagctggattggatgaacctat

SEQ ID NO: 53122 - DNA, 285 bp, Glycine max
  Clone ID: LIB3167-039-P1-K1-F10
cccacgcgtccgcccacgcatccgctgtctcgtgcgctacaatggcctcagccgcagccccgaccactttctctctcctccactccgccaccccttcctcctcctccaccgacacctacgcctccccctccccctcgcgcgtgcagctcacctcctccctccgcgcccgcccgctgcgccgcctgggcttcgccgcggcggacccgctgctcgcggcgagtgtagcggcgcgcgtggcggcggtgagaggaggaggaaagggcgcgaggggggcggtgtccatgg

SEQ ID NO: 53123 - DNA, 332 bp, Glycine max
  Clone ID: LIB3167-039-P1-K1-F11
cccacgcgtccggagaactaagaaggagaagcaaatggcttcctcaatgatctcttccccagctgttaccactgtcaaccgtgccggtgccggcatggttgctccattcactggcctcaagtccatggctggcttccccaccagaaagaccaacaatgacattacctccattgctagcaacggtggaagagtgcaatgcatgcaggtgtggccaccagttggcaagaagaagtttgagactctttcctacctgccagaccttgatgatgcacaattggcaaaggaagtagaataccttcttaggaagggatggattccttgcttggaattcg

SEQ ID NO: 53124 - DNA, 470 bp, Glycine max
  unsure at all n locations
  Clone ID: LIB3167-039-P1-K1-F12
actctccttcagagtgatgcactctatcagtatatacttgaaaccagtgtctatccaagagagcacgagtgcttgaaagagatacgcaagatgactgcaaaacacccactgaacatcatggcaacaccagcagacgaaggacaacttctgagcatgcttgttaagctcacgaattcaaagaacgccttggaaattggcgtattcactggttactctctgctctccactgccctggctcttccccctgatggaaagatcttggctttggatgtgaatcgcgaatactatgagttaggattgccaataattcaaaaagctggagtggctcacacgattgatttcagaagaggacctgctcttccgtttcttgacgagatgcttaaagatgaaaataaaaaggggtcgatggatttcgttttcgtggatgcttgataggacaattactngaactaccacaagagggtactaga

SEQ ID NO: 53125 - DNA, 419 bp, Glycine max
  Clone ID: LIB3167-039-P1-K1-F2
cccacgtcgttcgatacctctggtagtgtcgtttataccccttgaactttgcacctacttttggagggcgggagaatggaacttgccgaatgggagattggcttatgttggcattcttgcggattcatagtttcaacacacacgtgacaggcaaaggaccaatttgagaactctcttgcagcacactttctgacccgtggcacaacaccatcatcaatacaattcgtggctactaagtttgtatccaatgacatggataagcctgtgtccttctcgtgtaatcctgaatggatgaatcttgagagtgatttgggcgtgattgttgcgatccatctatttttatgtacagaggaactacgatgggtttatattgttatttaagactgcccatcaattagtaataaagcatgatactttct

SEQ ID NO: 53126 - DNA, 416 bp, Glycine max
  unsure at all n locations
  Clone ID: LIB3167-039-P1-K1-F3
atcttcttcccaaccactacgccactactactcactcactgcagatctcaattgcatcgctggccatggctaccatcgttagcatcaaggcccgccagatcttcgacagtcgtggcaatccaactgtcgaggtggatttgacttgctccgatggtacttttgccagagctgctgttccaagtggtgcatccactgggatttatgaggcccttgaattgagagatggaggatctgactaccttggaaagggtgtatcaaaggctgttgacaatgtgaacaccgtcattggccctgctttgattggcaaggacccaactgagcagactgctattgacaacttaatggttcaacagcttgatggaactggtaacgaatggngttggtgcaagcaaaaactaggagcaaatgccatattg

SEQ ID NO: 53127 - DNA, 330 bp, Glycine max
  unsure at all n locations
  Clone ID: LIB3167-039-P1-K1-F4
aattagggtttcgcttagtgtaaccaattacttgggagtcttcacctttgtcgttcgcaaatccggcgccgaatggagcgccaagcaacattccggcgacatcgaggcctccgccgactccacctacgatctccaaaggaagctcgtgcaagccgctctcgccgntgattcctccggtggagtccagtcctccttctctcccgtgtctcctacctccgctgtgttccaggtgatagtgggtggtgctgtattcgttggaggtggcggtggtgctgttgcagctgcacctgcaggtggtgctgctgaggtgatgctgtgcagtgatgctgc

SEQ ID NO: 53128 - DNA, 348 bp, Glycine max
  unsure at all n locations
  Clone ID: LIB3167-039-P1-K1-F5
ntgccgaattaatgcactcctttctttgtctagcggacaacggtatctttataacnncatcnnaagtacccttgcnntgctgcgttcnctgagcacaaannaatttgctttcaaacgacggtcnctcgagtntctttggtaccactttactcgaagacgagtnnntcccctttggatactttttcaaaattttacccccgcgttttaatcattatgctcgttatacgcccctaacgtatgacgaaatcctgaagttcttttgtactttttccgaagagaaggttccccttgggatacctttcaaaattttacacttattttaatcaattttcctgttattatcgtatg

SEQ ID NO: 53129 - DNA, 420 bp, Glycine max
  Clone ID: LIB3167-039-P1-K1-F7
cccacgcgttcgcccacgcgttcgggagaaagtgaaggtgcttcggcgactcctcgagacggaggggttcaccaggggccagcctgtttagacgctctgggtgcgaagctcatagaatccgctggcttaccctactgcatcaccagtggcttctccatcgccgcttccaggttggctctgcccgacaccggcttcatctcctacggcgaaatgctggagcagggccaactcatcacccaagccgtttccattcccgtcattggcgacgccgacaacggctacggcaatgccatgaacctcaagcgaaccgtcaagggtttcattgccgccggtttcgcaggaatcattctggaagaccagattgcgccgaaagcgtgtgggcacacgcgcgggaggaaagtgataccgagagaggagggc

SEQ ID NO: 53130 - DNA, 364 bp, Glycine max
  Clone ID: LIB3167-039-P1-K1-F8
gtgatcattgggttggggcttggcggcttggctggcttggtggctgcgccgcatgcatcggcggcggcggcttctgaagtggcggcgatggctgaagctgcctcgaacgacaacaggggacagcttctgctgtttgtggttacgccggctattgcttgggttctttacaacatcttgcagcctgctcttaaccagctcaacaggatgagatcccagtgatttaatgtttgtgaaatttaaatagggaaggggcttaattaaatgctgcgggatatcaattatcatcatatgatcatactaatagttttcatgtaacttgcttcctgcaacttgtatctaatgctatatccgcttttcttttaaa

SEQ ID NO: 53131 - DNA, 447 bp, Glycine max
  Clone ID: LIB3167-039-P1-K1-F9
atccctttggggagataagaaaatgtggcttgtgcagctctcaaccccatttctgaacgggcatggccatggctccagccttctctggaaacccagttcggcggtgactcagacccactgggccccgccgagtttgctgcctcaaatcaatgcgatgaagacgatgcagggaaaagtggtgtgctccacgaacgacaagacggtggcagtggaggtggtgcggctggcccctcacccaaagtacaagaggcgcgtgaggaagaagaagaagtaccaggcccacgatcccgataaccaattcaatgtcggcgacatcgttcagcttcagaagaccaggcccatcagcaagaccaaggcctttctcgcactccccggtcccaagaggttcttcaacaggcccgagccccagcccgatgagctttccattcccttcgagtcccagcccca

SEQ ID NO: 53132 - DNA, 178 bp, Glycine max
  Clone ID: LIB3167-039-P1-K1-G10
attacttcgcttttgttggccatgtctatattccgtgaaacgagtacgaatccacgaggggggccagaacctacagacctttcgattatagttaatcttcataaacgagatagatctactctttatgcgcagctattgacttattcaaagtatctggatactcaataccaactctaat

SEQ ID NO: 53133 - DNA, 241 bp, Glycine max
  Clone ID: LIB3167-039-P1-K1-G11
atttatttcttaactaaagcacacgatattaggtggatattgcgcacccatgagcaacgaagggattaaaagggagcatgtgaccacctcaggtattgagacattcggcaacggacagaaattgtgatgggccataaactgattacaatgtgctacgggcacttgcatgggcagtatcaaggattagctcgtatctcattagagtgaggtagccttagtatgcccagatcatgttttgatt

SEQ ID NO: 53134 - DNA, 415 bp, Glycine max
  Clone ID: LIB3167-039-P1-K1-G12
gtgaaaaccataacacaatacctcacgtacctctccataacttccatcttcgacgaatgacggctttcaccaccgtcaccggcaccgatcaccgccctacgacaaccgtgaaggcaagacacttggacatctgaatcattggtataaaatggtttcgtttgaaatgaatgatcggaagaagattggattaggcttaacgggatttggtatatttttctcattccttggccttatcttcttctttgacaagggattgctagcaatgggaaatatactctttgtttctggagtatccctgaccattggactgaaatccactatgcaattcttcatgaaacgtagtaatttcaagggaacaatttcatttggtatggggttctttattcttatcttggggtggcctattctgggcatg

SEQ ID NO: 53135 - DNA, 452 bp, Glycine max
  unsure at all n locations
  Clone ID: LIB3167-039-P1-K1-G2
actccactcaattgtatgcattgatccatggctagatacattaatattgtacttttgggagtggcgttggtagtggtgagattgaaaggtgcaaatgcacagcgggcgttctttgtgtttggggattctcttgtggataatgggaacaacaactttttggcaactacagctcgagcagatgctcctccttatggcattgattacccaaccggaagacccactggccggttctctaatggctacaacattcctgacttcattagtcaatcacttggggccgaatccacattgccttatttagatcccgagctcgacggngaaagattgcttgttggtgccaactttgcttctgctggtattggaattctcaatgacactggaatccaatttgtaaacataatcagaatatacagacagttggagtactgggaagaataccaacaaagggtgag

SEQ ID NO: 53136 - DNA, 410 bp, Glycine max
  Clone ID: LIB3167-039-P1-K1-G3
aacacacaaactgtctgtggcatcttcattcccatgcatcaaaatcccagcttgttcctcctggccatcatgcacatcttcatcaacttcatcatttagattttcttcttccaagccttatgctgctgtttctataaggaactctcagactgaagggcctctgagaagaccagtggctcctcctgtgagagaaccatcaagtagtgtccctcagccactgaagccttcacctccttctcaggttccgccccagaaggcttctcctgttgctggggatgataataatgtcattacattagagtttcagaggcagaaggctaaggagcttcaggagtatttcaaacagaagaagctcgaagatgcaaatcagggtcctttctttggattcattgggcaaaatgagattagca

SEQ ID NO: 53137 - DNA, 387 bp, Glycine max
  Clone ID: LIB3167-039-P1-K1-G4
catccaccaccaccactatcaattcctctggtgttgctccaaactacatcactcaccaccaacaccagcatttccaaggactcgttgaaagccaggaccatcagcaaaaccctgtgcctgcagtgtgtggattctcagggttaccactttttccatctcaaagccaaagaaaccgagacagcaacaacacccccaccaccaacaacataagaaacagtggtggaaatattgttgacgtggttgcttcttcttcttcttcttcttccatggatgacacttcagcagcagcagcaacaagtggttggatcgatggtatattgaaggatctcattcacagttccaacagtgtttcgattcctcaactaatcagcaacgtgagggagatca

SEQ ID NO: 53138 - DNA, 369 bp, Glycine max
  Clone ID: LIB3167-039-P1-K1-G5
gaggaagtggtgctgttgcattgcgtgaacaaattgaggtgtggtgtgcatgttcaacattgggcgccgatgatgggttcagctactgtgcaaatagcgacgtcaaaatttgttctttgcccgaatgcttcagcggcgaaggttgcgagttccaagaagaatgccgtcatcaatttctcttccaacttcaaaggaagtgttaccaaaatccatgccattccccctaatggctctgtctctatctgctcttcgcgtgtgtctgtgtcaagtttaaaggcagatgagaacaagcgcagaagtaatcttgaatccctgttttgatatgataaggctatttcagaagaaataattgagaaaccttgtgggtta

SEQ ID NO: 53139 - DNA, 379 bp, Glycine max
  unsure at all n locations
  Clone ID: LIB3167-039-P1-K1-G6
gtccgcttttgttggtttgggtgttggttttntctttaacttgaaaaggttttgctgcggaggaaagggcggttgtgaaagcgcctgcaagtgcgcaaacggttgcggaggctgcaagatgtacccagacttgagctacaccgagtcaaccaccaccgagaccttggtcatgggagtggcaccagttaaggctcaattcgagagtgctgaaatgggtgttcccgctgagaacgatggctgcaaatgtggagctaactgcacctgcaacccctgcacttgcaagtgaggtgtttggagagctaaagcttcaagcagagatggcccttagaaataatgataaaaactatatgtagtttcaaaacttcaaaatatgtagtat

SEQ ID NO: 53140 - DNA, 306 bp, Glycine max
  Clone ID: LIB3167-039-P1-K1-G7
agagtctaaaggtgaagaaagtggtggttttttcacatagaaagctcatgcaaaatgcggcgggtttcatcggcaacaacgccactctcgattatataaggattccttaatacacatggatctcattcaacggctttcactgtttcccaacccaatgcgtcttaacaagacttcaatagactcaattctgttctctaagatccacatttatatctccatatacttacaacgctagacaatatcaaaccattctaattgtataataacgaactaactactaagaacaatgtatcaacttccgatagg

SEQ ID NO: 53141 - DNA, 463 bp, Glycine max
  Clone ID: LIB3167-039-P1-K1-G8
gttaaatcttaaccctaataataatagagtattcattaattgtctaccaggtacaatgtctgtcagtaacgaattaatattatacattttcttgcattttttctccaatgtatattcatttataataatgacggaaaaatatatatgatgtaacttttgtagaatgaagaacaagtggagacaattgatgcacatgttgtgaaacaagctgtggtacaagcaataaagaattggagcaaaagtggcgatcaagaagagtaaatcagtaatcaaatgtttgctatatatattgcaattttccaatttttttttcccattttctttcatgttggctaactggtaaattgttccttgaggaatcaggcgtcgtacaagatagcttccaatttttaatgaaaatatatatgtgccagctgtaagagaatgataaaaagtagttgatgggtgataaaatttatgtatg

SEQ ID NO: 53142 - DNA, 454 bp, Glycine max
  Clone ID: LIB3167-039-P1-K1-G9
cttcctttgtttttgttgtccttcttcaaataccgtaaaaccttcaagaatccaccacttcggccaggtcctagaggccttcccataatagggaatcttcatcaactagatagtccttctcttcatgagcagctatggcatctctcaaagaaatatggtcctttattttcccttcaatttggattaaggccagccataggtgtttcctctccaaaattggccaaagaggtaatgaaagacaatgaccttgagtgctgtggacgacctaaattactaggccaacagaaactaacctataatgggttagacatgggattttcctcatacgatagttattggagagaaatcagaaaaatttgtgttggccatgtccttagctccaaacgtgtccaaagctttacctcaataagacattttgaggtcaagcagatgattaaaaaaatatctaggcatg

SEQ ID NO: 53143 - DNA, 387 bp, Glycine max
  Clone ID: LIB3167-039-P1-K1-H10
ggataatggtaactctaatgatgctaagcatgttgttggggtaacgtcaaactcgtgggtgggatcggctgatgacgctggagaaatcgtgcaaattccattggatgataatgaaatacaagatatagagttgcaggatgctaagaatgtggaaaatgatgctgatgctgtgccaatcacagatgctccgattatcggtgctccatttcgtttgatatcatttgttgctaattttgttagtggtgctgacttggttaaccaaagctcttcaaacactgctcgttgacttggttgaccaaagctctgttttttttggctggcagtcttgaacatacaataacctcacttacattaggcagaataccaatataggttggcctaatttgg

SEQ ID NO: 53144 - DNA, 433 bp, Glycine max
  Clone ID: LIB3167-039-P1-K1-H11
caagaatcttgctgaatgctggttttaatgagattgagcctgacctcaatgaagatgctagggatcaatatgccactaatggcgatgacgctgatgattttgtgtatatatggaatatatgatgaccaccacacttaccatgaaggagaacagaaaggaacattttggggctcaatcgcagaagagatggcagcagcagaaccccccactggattccaggggattatttcatggctcttcccaccagccattgctcttggggtgtacttcaatgttccggtaattctaaaagttaattggaattaatgaagaagaactcaatcttcaaatcacttggctactttgtttacatataaagttcttagtttacttggtggaaagaagagccataaattctaacaactttcttgttttcagggggagtacttataca

SEQ ID NO: 53145 - DNA, 326 bp, Glycine max
  Clone ID: LIB3167-039-P1-K1-H12
gaggaatgggaatcttgatttgagaaactgtatcttgattcggaacctattaatcagggtgataatagtgaacatggaaaacagttggagctacaatatgcagctgaaacacgtgctatggagcctcctcacaagtatgttccttgggtagtttaggatggagaaccactctatgaggattatgagtacttcttaagctatctttgtaaggcttataaaggtactgttacaccccaaaggtgcacccaagcatcatacctaagagaagtgaatgcaaagctctaagcattcggtttgctacactgacagcgcgattatgctaacat

SEQ ID NO: 53146 - DNA, 424 bp, Glycine max
  Clone ID: LIB3167-039-P1-K1-H3
cccacgcgtccgggtaatactaacaaggagaaatcataataataattgtggtaaagtttggggcttttgaggtttcctcgttgcagtgaaacatgggggactcaacttgtctcatgcaacaaccattctgttatgcttccggcatttccaatgaagccaacgagaacaaccctattcatgcacttgggcaatcaatttcgtttgggaggttcatgtcagagtccctggcatgggagaagtggtccagcttctcccacaaccgctacgtagaagaggcagagaggtactcaagacccggttcagttgcacagaaagaggctttctttgaagctcactacaagaaacttgctgctcagaaggcagctgcactgcttgaacaagcaaacaatgaggcacagaaaaatgccacaggacaagaagatga

SEQ ID NO: 53147 - DNA, 186 bp, Glycine max
  Clone ID: LIB3167-039-P1-K1-H4
tgatgcccactggaatccagcaaccacagaatacttgatttcattcaaatactggactcccttacacatatcaaccaccatgttgggtccaagggtctcagggccaaagcaccagattttcttggcgagatccttgtcccaaccaaactcttttgacaagatcttggagcgaatcttggggtcatc

SEQ ID NO: 53148 - DNA, 407 bp, Glycine max
  Clone ID: LIB3167-039-P1-K1-H5
ggaaaagaaagaaagcaaaaaaaaacagcgccctagatttgctcttctttgcttcggaagagggaggaaaacaaataacaatggcgttcgcttctttcctcggcagagttctcttcgcttccgtcttcatactctctgcttaccaagaatttaacgaatttggagttgatgggggacctgcagcaaaagcactcagacctaagtttgatgcctttacacatcgagtgcattctcaagttggctttcaacttcctgagattgatctgaaatttttaattgctggggctattgctttgaaaggccttggaggggttcttttcatatttggcagctcttttggagctttgcttttgctcctgcaccagctgattgctacccccatccattatgatttttacaattatgac

SEQ ID NO: 53149 - DNA, 413 bp, Glycine max
  Clone ID: LIB3167-039-P1-K1-H7
cccacgcgtccggccagccatgtcgatcttttctattccctcaccaacgtaccgttgttcaggttcaatttcaatttctcggcagccattgccatgttctttcacggctcaagtgagaagaagagggaaagggaaagtggtaatgagcatggaggcaggcattggagtgatgggcaccaagttgggtatgatgagctatttcgaatccgacggagaggttgttcctgtcactgtcgtgggtttcaaagaaggcaacatcgtcacccagatcaaaactgaggccaccgatggatacgacgccgtccaggttggttaccgaagggtcagagatcgcaaattgaccaaacccgaaatcggtcatctccagaaggtcggcgccattcccatgcgccatcttcaggagttccgtcttc

SEQ ID NO: 53150 - DNA, 462 bp, Glycine max
  Clone ID: LIB3167-039-P1-K1-H8
gtgtgattccttcacgcacgaaagtgcatattctccacaaccagagaggctcacgagatttgattcaataaggagcaggaaggattttggctacaataatcataaattcacaaggtttgactccataagtagcagcaaggattttggctccaatcctgagacgctcacaaggtttgattccatgagtagcagcaacgattttggctttggtcgtcagggacatgcacggtttgactcaattagtagcaccaaggacttcggtcacagtggtccattctcttttgatgactctgatccattcggctcctctggcccttttaaggtctcttctgaaaatcattctccgaagaaaggttcagataactggagtgcattctagcctgcattccaactctttccagtttttctttgttggttccatttccttgattattcttgatagcctatttttttttggggata

SEQ ID NO: 53151 - DNA, 435 bp, Glycine max
  unsure at all n locations
  Clone ID: LIB3167-039-P1-K1-H9
ggcactttcgtccttgtttacaccgttttcttcgccaccgatgccaaacgtaacgccagagactctcacgtccccattttggcacctttgcctattgggttcgcggtgttcttggttcacttggcaaccatccctataaccggcactggtatcaaccctgctcgtagtcttggtgctgctatcatcttcaacaaggaccttggttgggatgatcactggatcttctgggtgggacctttcattggtgctgcacttgcagcactctaccaccaggtcgtaatcagggccattcccttcaagtccaagtgattcaatcaaaccgttcatgcttaatcaagttgggaacaacaaaaaaaatcaaaacaatgtttctgggtttcggtttcatttcatcaagatgatcntgttatctttttttttttaattttaatttaa

SEQ ID NO: 53152 - DNA, 365 bp, Glycine max
  Clone ID: LIB3167-040-P1-K1-A11
gtgggatgctcttgaaaacaagtccacagtacttttttatggtggtggggctttagttgctgtggggctatcgtcgattcttgtgagcgccatcaactctgttcccttgcttccaaagattatggagttggtggggctagggtacactggatggtttgtctaccgataccttctgtttaaggtaagtaaaatacaccacgaaggcacaaatactttactattttagattttagaatctaacacgttttgttgtgtggacataagtggtggttttgagtatatcaagcccttgcattggtgtcaatattttttggatttgaatgatcaacttctttttttccatggatatccatttaccgtttttc

SEQ ID NO: 53153 - DNA, 454 bp, Glycine max
  Clone ID: LIB3167-040-P1-K1-A12
ctcagaaggttttggtcagtgaagtcttctccttctacaacaacaaggggttgcagttaaaagggatgaatctgaatttcaacgccttctccaactcttccccgttgttcgttctcgcgattacactgcagaagcatcatcatccaaacaaattgcatctgggtcagcacagaatgaggtaaaggaatggcaagatgcatgggatgaaagggataaggattttgagaagcaaggaattaatcaacaagattcattttggagcaagctaaagtcggaggctgctaggaaggtgggtgcagaagaagcggagagattttgcaaggcgttccaacaaatccataagaaactagtcaatgaagagttgagtttagatgctgctcgaagcttcttaaaatcatcctagagttctaaagaatcacgcatgctttcgacatttcttatgattgaacaatca

SEQ ID NO: 53154 - DNA, 386 bp, Glycine max
  unsure at all n locations
  Clone ID: LIB3167-040-P1-K1-A5
ggttatgagntttctgatcgttccctgagagagcttttttttttggttgcagaagaagtttgtaagggggggttcatctatcgcgagatcccaccactagtatgcctaaaagaagctctgagatcgacgacgatctgaaactgctagcattttgggacaagaggatctcacaggaggtcatcggagatgcactcggtgaggaatttaaggtctattgttttaaaattaccggaggttgtgacatacaaggatctccaatgaagcaaggagtgctgactcctggtcgcgttagactttcgcttcacaggggaactctctgctttcgtggatatggaaagcgtaatggagagcgtatgagacagcctgttcgtgggtgcattgtcagc

SEQ ID NO: 53155 - DNA, 384 bp, Glycine max
  Clone ID: LIB3167-040-P1-K1-A6
gacccacgcggtcgccacacgtacgccacgcttccgtggttttcacattgttttctacggcctcggaatctaccttgtcggtgtctttattggctgtgtctcccctctggttgatccagagctctatccctccaacgcccctatgcttgcaaccaaaggctccgatgagttcaaacccttcattcgccgtctccctgagttcaagatctggtattctctcactaaggctatctgcatagcgaatgagatgacctttatttccatgttggatgttcctgctttttggcctatattactctgctactgtgtagttctctttgacctcacacagaggcttcaagttgcacaccatattaaatacaaatatatcccctttaacttggg

SEQ ID NO: 53156 - DNA, 362 bp, Glycine max
  Clone ID: LIB3167-040-P1-K1-A9
agaacagccaaagctgatgagtactactttggtgaaggctgctaagcagtttgatgcatggggtgcggcgcttccaatatccgagtcaggtgaagaagcacagcttaagaggatttcagaactacaagctgaaaatgatgcaataggcctagaacttcagaaacagttggaagctgcagagaaggaattgaatcaggttcaggagctgtttaggcaagcatcagataattgtttgaacttgaagaaaccagatgacagttagctatttgtgttccatgaaagcttagatgaaatttgccacatgtatcttaacttgacaaaaagcaggtacagctgcaggaggattttcctttttctctttt

SEQ ID NO: 53157 - DNA, 91 bp, Glycine max
  Clone ID: LIB3167-040-P1-K1-B1
acgttatccacctcttttctttccttaatttgtattggacacaattcttcttaattttttttagcttattaatggaattatcaatttagtc

SEQ ID NO: 53158 - DNA, 149 bp, Glycine max
  Clone ID: LIB3167-040-P1-K1-B10
ctaaatcctacactattatttcaagatgctctttatttttattaccttactctcatagagcaagtttttcacaggcgcagagaccttccacagaatgcattttaatgtttccaacatttactctaatcatctcaatccaattttgctcc

SEQ ID NO: 53159 - DNA, 347 bp, Glycine max
  Clone ID: LIB3167-040-P1-K1-B2
agcatgtcttctcagtagcgtgctttcttcgcttctctttctcttcgatattcgaagtccgcggctggctccaagcgatccatgcaatggcctcctccgagattaactgggacaggactcttcacgggtgttacagcggcactctacccggtttctgttgtgaaaactaggctgcaggttgcctcaaaggatactttggagagaagtgcgttttctgttgtgaaaggtttacttaaaacggatggcatccctggtttgtataaagggtttggtacagttatcattggagcgatttctaccagaatcatattcctcactgccttagaaacaaccaatgtggctttctt

SEQ ID NO: 53160 - DNA, 266 bp, Glycine max
  Clone ID: LIB3167-040-P1-K1-B4
cacagtcaaaaaaaaaaaaaaaattagctctacagatagcatttttccacaggaggaccctcgggaagggtcaattttatgttactttttcagtccattttactagggaaagtagtaaagtttaatacaaataatcaagttttgcttttttcattgttagatataatatcattgtatgataaattcgaattctgaggtttatactgtacttggccgttgcaattcaggaatgtaattctgataatcggattttcatggccctaaaa

SEQ ID NO: 53161 - DNA, 459 bp, Glycine max
  Clone ID: LIB3167-040-P1-K1-B5
atttccccgacttcaccttagctatcgccgaaaacccgtaccttcatataaacatatatatatgtgatactctcacgtttgacgcgtccttctcccaccgcaccccacacttccggcaccgtcggaactcagcaccgcacatctgcaccccacactcgtcttctcacaaccgtcaatcgcagtcacagcgcacagcttcgagttcagaggtcccccccttcactgcaacgttttcaccttgatttcttcagctctagttctctctcacaagctttctccagctttgcaactagctttgtctgactctggcatatatttttgttcttcagaaaaatactaatggattcatcacaaagtgcggctcttgggggaaatggtgggagtggtggaaatgggacgttgatttctcaaattaatgacatggcagcccttgcaacaggagctgatgattctatgcag

SEQ ID NO: 53162 - DNA, 470 bp, Glycine max
  Clone ID: LIB3167-040-P1-K1-B6
gagcaaagaacacatagaaggcaaaccccagatcacttgtgtctttggattgtacatttggtgtgcagcatctgaccctgcagatcctggggttttcaagtccaaaaaatatcttaaaattccagatagcaaaaagcttgatggactcaagaattctaaactaggaggcgaatcaacttcgtcaatgcatgatggaaatgcttcaactgttggaccaaaatcggtcgataaggaagaattgggaactgaagcaagttttaaagatgctgctatttctacagagaagaaaaatgcatcatcaccttctttgtcccgtctcctattggtttgctctccttgtgcttatatatgtggttgctcaagttcaagtaacgaatcttctgatcaacaagcaagtgaagatggcatgttctattgcagtttgtgtgaagttgaggtcttcaagtatagcaagcattgtagagtttgtg

SEQ ID NO: 53163 - DNA, 444 bp, Glycine max
  Clone ID: LIB3167-040-P1-K1-B7
gcaaactgaggctgttccacctattccatttgcattgaagccttcccagtctaaggaaggtagggccaagcctaaggatgaaccaaagaaagtggctaaaccagagcccaaagaagtagcagaaccagaggaggaggcacccaagcccaagcccaagaatcctcttgatcttcttcctccaagcaagatgatcttggatgagtggaaaagactctactcaaacaccaagaccaactttcgggaggttgcaatcaaaggattttgggacatgtacgatccagagggatattctttgtggttctgtgattacaaatacaatgatgagaactcagtttcctttgttacattaaacaaggttggtgggtttttttagaggattgacctggcttcgtaagtatgcttatggaaaagatgcttgttgatttggtccactagcaccatttt

SEQ ID NO: 53164 - DNA, 335 bp, Glycine max
  Clone ID: LIB3167-040-P1-K1-B8
cactgacatggacacctacaactactctattgttctttccaactccctaaccttctttggggggctacttaccaaggcacactcgacctataccgctcttcttcaccttcaacacgttcaacccattccaaccaaacattatgctccaaaaagacgctagtattccatcctctggagtgttacaactcaccaaagttcacagcatctgcgtgcccaccttcatatctcttggtcgagccctttacactgccccaatccacatatgatacagcgaaaccaccaagggagccagctggtctacattctttatattcaacaatttctcacctcaacaa

SEQ ID NO: 53165 - DNA, 373 bp, Glycine max
  Clone ID: LIB3167-040-P1-K1-B9
ctaatatccgaaggcagaaagagtgtattgagctttgtgctcttggggaagaggcagcagaggcaataatggcttctacttcttcttcttcttgttctcttgcttctcagtttctccctcctcctagaaagctttctgtaatcccttttcactcaacgaactgcacacatttgtcattcccggctgttgtgactccaagacaacaaccactgttgttgttttcttcaacctcaacttgtttggcggcggcggctgcgtcaaactcaaacaacatttggaattccaacaacaacaacataccagcttcttcgtaagagaaggaagtggaagtggaagtggatgaagagcttccatgttttcatgaaatggcttt

SEQ ID NO: 53166 - DNA, 421 bp, Glycine max
  Clone ID: LIB3167-040-P1-K1-C1
acaacttctgctactttctactccaaccgcacttatgtttcgcaattatcatgggcaagggcgagatcggaatcaacggatttggaagaattggccgcttggtagccagagtggctctgcagagagacgatgttgaactcgttgccggtaacgaccctttcatcaccaccgattacatgacatacatgtttaaatacgacagtgttcatggacactggaagcatcacgatgtcaccgttaaggacgagaagacccttctcttcggtgacaagccagtcactatttttggacacagaaaccctgaagagatcccatgggggtcaactggagctgacatcattgttgagtcccacggagttttcaccgataaggacaaggccgccgcacatttgaagggtggtgcaaagaaagttattatttc

SEQ ID NO: 53167 - DNA, 453 bp, Glycine max
  Clone ID: LIB3167-040-P1-K1-C10
caatccttttcgcctttgtctgcgaatggcgtcgttcgatcaggcacctcccggcgatgtcagatccggtgacaaaatcttcaggaccaagtgtgctcagtgtcacaccgtcgaaaaaggtgccggtcacaagcaaggacccaatctgaatggtttgtttggaaggcaatcaggcactactcccggttattcttactcttcagctaacaagaacatggctgttacttgggaagaaaagacactatacgattacttgcttaaccccaaaaagtatattccagggaccaagatggtatttcctggtcttaagaagcctcaggaacgtgctgatcttattgcatatctgagagaatccactgcacagtgattatacattttcatacattcaatttttgcagtgtgctttcaaagttctggagatttaattttcggtcatttagttctgccatgcag

SEQ ID NO: 53168 - DNA, 287 bp, Glycine max
  Clone ID: LIB3167-040-P1-K1-C11
gaaaagggtattgatgacattatggtgtcattggctgccaaagatggcattgattggactgaggacaagaggcaattgaagaaatcagagcaatggaatgtcgaagtctattaatttctgttcacttgcacaaatatcatctcctactttgtgctgcaacaagtctatcaaccctcctgcgttgtgtagatatatgacgtccctgtaatttttctttgacgatttttatactgttcatgaacaacttcaatgtcagttttacaagtactatttttgagggatgatgc

SEQ ID NO: 53169 - DNA, 206 bp, Glycine max
  Clone ID: LIB3167-040-P1-K1-C12
ggtctgatgaaacatttgagttttctccagccaattacaaggattccattttcaaaacgtgcagcaaggagaactttgaaccacatcatgttctaggaaattagctctagttgtttgtactgaaaaacgaaaaagctgtgtactacttgttatgtttccttctggaaatgcgacttattatcaatactatgtattttttgggtgtt

SEQ ID NO: 53170 - DNA, 458 bp, Glycine max
  Clone ID: LIB3167-040-P1-K1-C2
gttggttgcgattgaaacggtacgatgggaagaggaaaattcaagagcaagcccaccggtcgcggccagttctccaccccggaagatatgcttgctggaacctctaaccgtcctcgaacttttagacagaaagaagctgagcatgaagaggagcctgaggaagtatctggggatgaatctggagaagaatcagaagaggaaacttctaagaaaaaaggaacacaaggagttattgagattgaaaatcctaacttggtaaagccaaagagcttgaaagctagagatgttgatgttggaaaaacaacagaactttcaaggcgtgaaagagaggagatagagaaacagagagcccatgagcgctatatgaggctgcaagagcaaggaaaaacagaacaagccaagaaggatttagaacgtttagctcttatacgtcagcaaaaggaagatgctgctaaaaa

SEQ ID NO: 53171 - DNA, 344 bp, Glycine max
  Clone ID: LIB3167-040-P1-K1-C3
aaagagaatccattttccattaaccaaatagcaggctaaatgagtgaccaaattagcatatgctgagggtgttggatcttagagagaacctatacatgatgacattgattacattataacatagtaaaaagcaagcatagaaagacaatggaacatgatgaaaattagccaaagaatgcagggtcatagccattgctagtggtggccaagatatagtaagcaacaacatggccaatggagccccaagccaagacatcaacaatgttgaattcaacagggtcattggatttgaggaggctgacatactccttggcacgtgtgtcaccagcctcaaagtgtgtgag

SEQ ID NO: 53172 - DNA, 465 bp, Glycine max
  Clone ID: LIB3167-040-P1-K1-C4
cccacgcgtccgcagagctggaattgctgagtttgtggcaactttcttgttcctctacattaccatctgaactgtcatgggtgtcaacaggtcaccctccaagtgtgcctctgttggcattcaaggcattgcttgggcctttggtggcatgatctttgcccttgtctactgcactgctggaatttcagggggacacatcaacccagctgtgacctttggtctgtttttggcaaggaagctgtccctaacaagggcactgttctacattatcatgcagtgtcttggagccatctgcggggctggtgtggtgaagggctttgagggcaatgctaactatgagttgttcttgtctacaccgttttctctgccactgatgccaagagaaacgctagagactctcacgttcctattttggctccacttcccattggatttgctgtgttcttggtccacttggctaccatt

SEQ ID NO: 53173 - DNA, 351 bp, Glycine max
  unsure at all n locations
  Clone ID: LIB3167-040-P1-K1-C5
aaagattcttccttnctctgctctttgtcttctctgacacatttggggccttgttgagtgtgtttgtgcaagaggatatggcgaaggacgttcactctcgctgagcgcctctccttctctggaaaggactaccaggaccctccaccagcaccactcattgatgctgatcagctcacaatgtgttccttttacagcccttctatcgctgtgtttactgccacctctctcttcctttacattacttccctaacaggtatcgggttcacgccccactccggtcatgctgatccatttgttattgtttgttttttcttatctcctactttcgtcccatttaaattattattcttt

SEQ ID NO: 53174 - DNA, 466 bp, Glycine max
  Clone ID: LIB3167-040-P1-K1-C6
caagcaaccatggcaatggcaacccaagcctctctcttaaccccacccctctccggtctcaaaggcagggaccgtgcctccgtgccatggaagcaaaactccagcctctccttctccagcccgaagcccctcaagttctccagaacaatcagagcagcagccgccgacgagaccacagaggcaccagcaaaagtagaggctgcaccggtcgggttcaccccaccagaacttgacccaaacaccccttccccgatcttcgggggcagcaccggcgggctcctgcgcaaggcacaggtggaggagttttatgtcattacgtgggactcacccaaagaacagatctttgaaatgcccactggcggcgccgctatcatgagggagggtcctaaccttttcaagttggccaggaaggagcagtgcttggctcttgggactaggctcaggtccaagtacaagatcaagtacc

SEQ ID NO: 53175 - DNA, 402 bp, Glycine max
  Clone ID: LIB3167-040-P1-K1-C7
gctctctgaaattcatattccaattcgtttgaaatttatttgccataattccaatccagctcgtgagcttccttaatcggaaggaacctcaccatgttgaaatttcacatccacagaattcttgtttgcgccaagggtttcacattcacaaccctaaaatggaaccctattgttcaactccaatttctcaaattctagttctgcactacctcacgctctttcgaggtgccctacctcatcaacaattgtggctttttccaagaaaacgctctcaaagcttccctcaggctccgtttccgtggcccccaaaagcccgattcaattctcttcttctttcgaagccacggcttcttcaactttcaaatatgccatattctacaaaaagcacctcggttactttta

SEQ ID NO: 53176 - DNA, 422 bp, Glycine max
  Clone ID: LIB3167-040-P1-K1-C8
cccacgcgtccgcccacgcgtccggctagaagcaataagatgaaaatgaaagtgcttgttttgtgtgttgctacaggtttggtagcatatgaatgccatggctcagactaccaaaagttccctctccaaatgaaaactgggtttggtgggcaatacagcaatgaggtggcatgtgccagttggaggcttggcgtggaagcaaacaacgtagtcaagtggcaaactgttcctgcagcttgcggagagtacatagctgactacgttctaggagaccaatatagatcagattccaaaacagttaaccaacaagcttatttctatgctaaatccctcaaactcaccaacaaagatgtctttgtcttggacgttgacgacactacttttttttaatcttcaagtattttgctaaccatggattttgg

SEQ ID NO: 53177 - DNA, 338 bp, Glycine max
  Clone ID: LIB3167-040-P1-K1-C9
gagattccaagtctacgagaatcgcaaacttactatatctgggaaggcttcatcaaatgggagtggttagcatataagtttttgttgtgtctgcagacaacaactgcttttcttagtcattatactgtatgtatttccttttatctgaatcacaccaacttgctgacccgctatatggatgctactgtagcaatcatgtgcataattggtttagccatttagccatatattgacaactttcaacagtcagtctaaaatcctgtcttcttcgttcataatctttaaaaattgtcaatcagttgttgatgttttaggtttagatctttggtgaatttaat

SEQ ID NO: 53178 - DNA, 462 bp, Glycine max
  Clone ID: LIB3167-040-P1-K1-D1
cccacgcgtccggcaacattgaaaagctcaatggctgcaacttattatctacttccaagtccgagaactttctcacctctcctcagaaatccactttccattccttcaggtcatgtttcactgttgggttcattggactatccattccattgttccagcagaagaggaaatagtgttgaggccaattgcaatgcaaagaagaagaacccttggttagacccttttgatgatggggaggatcctgagatggagtatggttccttgtttgcagatgggaagcaggaggaggatcctaggccaccggatgaccctgacaacccttatggattcttgaagttcccttctggatatgctgtggagatagcatccttggcattgaaagtgagaggggatgtgaggagatgctgctgtgtgatatctggtggtgtttatgagaacctcttgttctttccagctattcag

SEQ ID NO: 53179 - DNA, 464 bp, Glycine max
  Clone ID: LIB3167-040-P1-K1-D11
aaactttggacaaaaaatggagtgctacacaaggccaaacaggagtgacatccacctctgaggggaggaagaagccaccatagaggcaaagaccagagagtactttgatggggtcgcaccacaacgccacacaaagcctcaacgaagtgactattcagctcaatatgtcgatgctttctccaatgcccatcactcttctttaactataccagaattaacacaattccaactcctccagaacgatccccaagagaagaaattggtgtacaatggaagtcaagtaccggaagaatttgtggaaacagagtattaccaagatctcaacagcgtggacaaacaccaccatacgactggaacaggatttatcaaagtagagaaaaatggaaatgactttcacatagaaccagataatgacactggttgccatcactcttgcaagggcaatccagcaaccaatgattggg

SEQ ID NO: 53180 - DNA, 461 bp, Glycine max
  Clone ID: LIB3167-040-P1-K1-D12
cccacgcgtccgcttcctctttttctcaacaaaaaggggttcaattctagctagttctattacgtcgtccgcgaccatgaacatggcgatcgcgcttctgttcatggttttcgcagtttcatcagctttagacatgtcaataatatcacacgacaacgctcatgcggatagggccacgaggcgcaccgacgaggaggtgatgtcaatgttcgaggagtggctggtgaaacacgacaaggtgtacaacgcgctcggtgagaaggagaagaggtttcaaatcttcaagcacaatctgcgcattatcgatgaacgaaactctctgaaccgaacctacaagttgtgactcaacgtgttcgctgatctcaccaatgcggagtacagagccatgtacctgcgaaccttggacgagggtccgaggttgggcttggatacgccggcaagaaaccactacgtgccacgtg

SEQ ID NO: 53181 - DNA, 444 bp, Glycine max
  unsure at all n locations
  Clone ID: LIB3167-040-P1-K1-D3
cccacgcgtccgcccacgcgtccgtccggaaatcgttcctatcatcacttctcaaatctcgaggccggtcgttcgtgccgatcactaggtcacacttcatcaatggcgggtagaggcaaaaccctaggatccagcgccgctaagaaggccacctcaaggagcagcaaagccggcctccaattccccgtcggtcgtatcgccaggttcctcaaggccggaaagtccgccgagcgcgtcggctgccgagccnccgtctacctcgccgccgttctcgaatatctcgctgctgaggttttggaattggctggaaacgctgcgagagataacatgaagactcgaattgttccacgccacatccaatttgcggtgaggaacgacgaagagttgagcaagcttctaagagatgttaccattgcttacggcggtgttatgcctaacattcac

SEQ ID NO: 53182 - DNA, 439 bp, Glycine max
  Clone ID: LIB3167-040-P1-K1-D4
gctctttcttggaccccaagggaagaggtgcctctacaggttatgacaatgcagttgctttgcgtggtggtggaagaggagatgaggaggaacttgccaaggaaaacaacaagagtgcctcatcatccaaggggaaaatcaccttcagtgtcaccaagaccaagcctgagaccggcgaggttatcggtgtgttccagagtcttcagccgtccgacactgatttgggagcaaaggctccaaaggatgtcaagatccagggtatctggtatgctcagcttgagtcatagagtgttcttttttgtttttttttttttcatgccttagttctctagtaactccatgctgttgctgcattattatcccttgacccaacttccctagcacaatgagagttctgtcatatgtgtgtacatatacaccttcaattacaatgtcttaa

SEQ ID NO: 53183 - DNA, 331 bp, Glycine max
  Clone ID: LIB3167-040-P1-K1-D5
cccacgcgtccgggtgagtttaaaattgagaaagctaaccttttccataacgactatacccttgtgggcgtgtccagctggcgaagaaagcaaatgtgggcatattgggattcatttcgatgatgatggaaacaggcgtttggtggtgtctgaggagaatatattaagggttcagtttcagaaatttggatcatcagcaccggatgaggcatcactggcccttaaaaaacatcatgtgctctctgtcagtgagtgagtgagagacaagtgtaagactaaatgaatgtgttggatgtaataaacaaatttttaattgccataaaaaaaatat

SEQ ID NO: 53184 - DNA, 346 bp, Glycine max
  Clone ID: LIB3167-040-P1-K1-D7
aaacaatagtacgaggcaccgcattgttgagacttgagacttgagttatggcacttggggaagcctatgcttctctttcaatctcttctgttgctcgtcttttcactccaccaaaatgctctcccaccgctcactttcctcatcggaattttgttgcaactcgaccatcattcatcgttggttccccactcttgattcaaagaaatcatggaaggaaagctgcatgcaaagcaatccctgttccaataagatgtgagcaaagtacccaacaagggaatggtctggatgtgtggctaggcatactagccatggttggctttgcagtagcgatcactgttgaaatttc

SEQ ID NO: 53185 - DNA, 407 bp, Glycine max
  Clone ID: LIB3167-040-P1-K1-D8
cccacgcgtcctcccacacctccttttctcatcttttatcaaacttcaaaccctatctgagagggttaatgtacacttaacgatggcttcaaaactcattactaaagagttgaaggatctgcagcaggaccctcctttttcctgcagtgctggccctgttggtgatgacatgtttcattggcaatctacaattatgggtccaactgacagtccttatgctggtggtgtattcctggtgaccattcacttcccaccagattatccatttaaaccaccaaaggtttcctttctaaccaaggtattttaccctaacataaacagcaattgaagtatctgtctggacattctgaaagagcaattgattcctgcccttacagttttcaaggtgctactttcaaattgctccc

SEQ ID NO: 53186 - DNA, 423 bp, Glycine max
  Clone ID: LIB3167-040-P1-K1-D9
cgccgtcgtcgggatgctgcaacggagtgaagagcctcaatgccgccgacaagaccacgggcggccgccagacggggtgcaactgcctcaagtcggccgccagccaaatctccggcttcaacgccaacaacgccgcctcgctccccggcaaatgcggagtctccatcccctacaagatcagcacctccaccaactgcgctaccatcaaggtttgaagagaaagtcatggacgcaggaaaccggaaactactcactagtatatgagtagcattattaatattaagaataagatcgagggtgatgagggctccacttatatgcccctctcctcttgtatgagagatttgcatcggatagctttaagttgtgttgcgttgctatttctctgtatgtgttacacatagttatatctactttaatatt

SEQ ID NO: 53187 - DNA, 459 bp, Glycine max
  Clone ID: LIB3167-040-P1-K1-E1
cccacgcgtccgtttgagtcttcttgatccttctttttctccttgaactcaaacatggcagatgaggtggttctgctagatttctggccaagtccatttgggatgagggtcaggattgcacttgctgaaaagggtatcaaatatgagtacaaagaagaggacttgaggaacaagagtcctcttctcctccaaatgaacccggttcacaagaagattccggttctcatccacaatggcaaacccatttgtgaatccctcattgctgttcagtacattgaggaggtttggaatgacagaaatcccttgttgccttctgacccttaccagagagctcaggctagattctgggctgattatgttgataagaagatatatgatcttggaaggaagatttggacatcaaaaggagaagaaaaagaagctgccaagaaggagttcatagaagcccttaaattgttg

SEQ ID NO: 53188 - DNA, 214 bp, Glycine max
  Clone ID: LIB3167-040-P1-K1-E10
acgaaaaaataaaaataaaataaaaaattacttatttttttttaaaaactatataaaatataaggggggattttattaaaaaaaatggctccctctctaaaaaattcaattttattaacacttacattcaactacataactcttctataattccaccttaatatcaatctaattccctattttttacaaccacttatcttataaaacccttatt

SEQ ID NO: 53189 - DNA, 451 bp, Glycine max
  unsure at all n locations
  Clone ID: LIB3167-040-P1-K1-E11
attaatcatcacacactataatttatcatcattttcttcgttcagtgccacaaaacctggagtggtgtttctttcaacaggataatccatcacttccttgattatatcattaagnatactatactttttaatatatttttttaacaattttatactcattttctttcttttatatctattttaatcttatatattttcattttaaattattttattaattttattaattttttattaatatattttttttcttatatattttatctatttttttattactttttttttttcttataaattattctattaatataataatttaattttattttattaattttaatataattataatatatttattttttttatttttcatatattattttaattattttattttattttatcattttcttatattaattaaattatttatttttcttatttt

SEQ ID NO: 53190 - DNA, 445 bp, Glycine max
  Clone ID: LIB3167-040-P1-K1-E12
tgattttaatttaatttgattttatagcgacgagactcagcgagcaccaccaccgcgaccggggagcccagccaccgtgttcgacttcgaattgagtccgagaaggctgttagataggctttggacgtttaaacaattccgatcaagatccaattttgccttcccattttctcgtcgtttttttgtaacggtctttccatggcatatcccttctctgatttcaagtactcagatggcctcagtgtagtgggtatcttcttctgcacagctattgtctgtgaggctatctcatgggttcttatctatcggaccaattcttacaaaaaccttaggtccttcattgacaaagccttcaagaaacttgagaccatgaagactgacagcaattaaaataacaataagaagtctcagacccaaaaaaatgacccgtgttgagacaagcctt

SEQ ID NO: 53191 - DNA, 313 bp, Glycine max
  Clone ID: LIB3167-040-P1-K1-E2
aaggtctaattcactagtaccctatgagcttcatgaggttgctgatgcaaaggctgaggtcagtggaggactttgccaagtttaatctgcttctcaaagtcaagaggggacagaaggaagagaagttcaaggtagaggtacacaagaataaccaaggtgggttccatctaaatcagatggaacaagatcattcctaattctgatcggaagtttggccacgctagcagtataagcctgggtggcacctaaaatataccttttttttctgtggggcgtatgaatcttattatctatgctatacataattatatac

SEQ ID NO: 53192 - DNA, 455 bp, Glycine max
  Clone ID: LIB3167-040-P1-K1-E3
cgctgtctcagtgaagagaaacctctctctctagtaaaccactattgcacggttttgcaatctgaactcgtgcgatgggcctaacagcaacctacctcgaagaatcatcaaggagaacgcaccgtttgctcagtgagccagcaccaggaatcagtgcctccacttctgaagagaatatgcgatatttcaatgtgatgatccttgggccaacccagtcgccttatgaaggaggagttttcaagttagaactatttttgccagaagaatatccaatggctgctccaaaggttaggtttctaacaaaaatatatcatccaaacattgataagcttggcaggatttgtcttgatattctgaaagataagtggagtcctgccctcaaatccgcactgttctactaagcattcaagctctattaagtgcaccaaacccagatgatccactttctgagaaca

SEQ ID NO: 53193 - DNA, 222 bp, Glycine max
  Clone ID: LIB3167-040-P1-K1-E5
cccacgcgtccgtcgcagaataaaatttctcatcgtctatttctaataccttacaacgcgccgtgttgtccaccatgtcccggccgttctccaccttcgcattttcctaaattatgctaggctagatcggaatggtttctttaatttctgaagaacaccttcgtaggaggtttctaatttactcttctgctagaactgtatcttcaacaaggatttttaaag

SEQ ID NO: 53194 - DNA, 313 bp, Glycine max
  Clone ID: LIB3167-040-P1-K1-E6
acaacacttgctcttacttcttacccgctgacaaattacctaaggtaaaccaactgaatatgtggcgcggtattctatgcaggactctaccaacatcctgacatacacgctcatcgaagaccacatctaatatatgacatgccaaacacctagacacatcagacatctctatacaattgctcgttagattctatcacccttctcgctatgctaatgctagaaccctccgtgccagaaccttcttcgggccccttttctctacgaacctaaattgcttatctggaacaagtagaccatacttacattatggtga

SEQ ID NO: 53195 - DNA, 429 bp, Glycine max
  Clone ID: LIB3167-040-P1-K1-E8
atttgctggaactgaagagccagctgcttatggagaactgatctcgattgggggccttggtgcgagtgtcaatggaaaactgagttctacaattgcagaaattcttgaaactaagctatacattgacagttcccgtttctatatcaagttttatgatgttcagcgctcattctttgggttcaatggctcaaccttttgatctaacttttgttctagtaatagattgtgagtttcactgtggaaaaatctggctaattcttcttcctgtggattattacaaatttgtatccatgattgtatgaatgaatacaattaatttatcaaaatgggaaaatccgtcctcctttgttccttttttataaaaaaataattattttattatttatttattttttattattaattttttattctttttattttcaattt

SEQ ID NO: 53196 - DNA, 304 bp, Glycine max
  Clone ID: LIB3167-040-P1-K1-E9
atttttcttaaatagtataacttttgcttaattcttttttgtagctctattgcttcgcggcagttttattgatgaaatagatgccttgctgattgcagtaaatagttgccactcaattatatgttgctatgcgaactacagattgatcccctttctatctgtctctcccgtaagtggtttactcattcaactagtgtttggtatcattttgttacatgtgatttagtttgttcaagttgctttgaggaagttgtatttgcacagactggcttattcccttatcattctaatatcaagaaataat

SEQ ID NO: 53197 - DNA, 371 bp, Glycine max
  Clone ID: LIB3167-040-P1-K1-F1
cccacgcgtacgcccacgcgtccgccttggaggcccgccaagcttaagtgggaggaaactgccggcgggccgttcgaattcccagaactggacttgtttgcagcacaagctcaagtgcaacggcagattcctttgccttttctccgacaacagaaaggaggaacaagccagaaaagcattagaaggtgcactaagtgggaagaaaaatgaatttgacaaatgggacacggaaattaaaagaagagaagagctgggaggtggaggtgacacttgtggaggtggccggcttctttggtttctcaggcaaggccatggtattcatgaacatcttcatcatcgtcattttttagtattctgctctagaatcttcc

SEQ ID NO: 53198 - DNA, 457 bp, Glycine max
  Clone ID: LIB3167-040-P1-K1-F10
cccacgcgtccgcccactcgttcgcccacgcgtgttttccacacatgggaaaaattaattctgagggatccacaagatccgtccactccaaatgcagtttcatacaaaacagcagctagagagaaactgataaggcagggatacaacattgttgggatcattggagaccaatggagcgatcttctttgaggccacagaggcgaaagcaggacctttaagcttcctaatcccctgtactacattcagtagtttcttcacctctcaacaatctagcttgctcctatctatctatatgtaataagatgcgttcaaataggggcactagcttcactttatgttgtttcagctgtgtgtcaacaagtcatgttagagacttcactaagttggttttctttttcgtggcttttaataaattatgccccctttgttccatttaatttatatattttattttttt

SEQ ID NO: 53199 - DNA, 436 bp, Glycine max
  Clone ID: LIB3167-040-P1-K1-F2
gtttggagttgctaatgctaacattactaaacaattgttgttcattcagagcttcactcaatggtttgcacgtctcaatctgactcttcacttcacttcatcgattttgtgattctctctctcaataatggcagcacgctttcaatctgcagctgtactatgccggtgttccctatagggaaagatgaaattcaagtctaagaaaggatggaaatctattgtaccacttcatttgaaaggaaaatcggcgacccgtttttctttatttcgcaaagtcaattcagctgcctatggacctggcaaaacacccgtttatctgaatgtgtatgacttgacacccatgaaatggtatgtgtattggggctggtcttggtatctatcactctggtggagaagttcatggggtcaaatacgcgtttggagcttatgactaccc

SEQ ID NO: 53200 - DNA, 210 bp, Glycine max
  Clone ID: LIB3167-040-P1-K1-F3
tttttctttctctctctctctctctctctctctttctttttcctttttacctatcttgtgagctatgtgatgagtgagaaaaacaaaagtgagaaattgtgcgtgtatctggttgctaatactagtgcttattagtctgcggtatggttggtttgttaccccgctacttgggctttgtttgattgtattttatcctagagaaataaaaat

SEQ ID NO: 53201 - DNA, 356 bp, Glycine max
  Clone ID: LIB3167-040-P1-K1-F4
ctcaagcattgcatccctcttgatttgtagtttgttttgtgctttagataaaagttctgccaaatcaagaggggttttaagatcatagtgtgtgttttgcaacaatggctaagttctttgctgctatgatcttggcactctttgccatttccatacttcaaacagtggtaatggctgctaatgaacaaggaggccacttgtatgacaacaagagcaaatatggaagtggaagtgtcaagagttaccaatgcccatcacaatgctcgaggagatgtagccagacccaataccacatgccctgcatgtttttctgtcagaagtgcttcatgaaatgctctgtgtgtgccctcggtgtt

SEQ ID NO: 53202 - DNA, 352 bp, Glycine max
  unsure at all n locations
  Clone ID: LIB3167-040-P1-K1-F5
cacattggctcctgctcgtgacttctggttgttgcgctacacttctgntttagaagatggaagcctagggatctgtgagagggcgtcttaaaaatactcaaaatgtttcaagcatgccttctgtgcagcatttttttagggcagagttgcttcctattgtgtacctgatcagaccttgttaaggaggtggtttcatcattcacatttttgattatattttattttagattcctttgtttttgccttttgttctattctctctgttttaaattttatatagttcttgtttaaatgacatttatttttattctttatcttttacttatgattttacttcaactatatttttttt

SEQ ID NO: 53203 - DNA, 532 bp, Glycine max
  unsure at all n locations
  Clone ID: LIB3167-040-P1-K1-F6
cgggncgagcccacgcgtgccgaaaatataaacaactcaaaccacacacttttcacaccctctttcatcatctctcagcaaggtaccaagaacgaggagagagaacaatgttcttgcgtccagatctcacccaatgttggtgtccctcaaaanccttctccttttccgatccctttccaatctcttccttccgcttctgtcccctcaacccttttcagcttcccttcacaannaacccaacttcatgcacctccttcacgcttcctcaaccacctcaaattcagtgtggtctgagagaactcagaacccgcattgattccgtgaagaacactcagaaaatcaccgaggctatgaagcttgtggctgcagccaaagtgagaagagctcaagaagctgttgtcaacggaagacccttctcagagaccctcgttgaagtcctctacaacatcaacgagcaagttctaactgaggacgtagacatccctctcacaaagtgtaggcctgtcaagaaagttgcacttgctgtggtcac

SEQ ID NO: 53204 - DNA, 398 bp, Glycine max
  Clone ID: LIB3167-040-P1-K1-F7
cccacgcgtccgcccacgcgtccgctattgttattatggaatttcgatgctcattcatcgcgtggaccattctctgcgctggggctcttgcaggaaagagccatgtccatgcatcgctacctgaggaagattattgggaagctgtttggtcaaacactcccattcccactgcactgcgagagcttctaaagcctctcccttgaggtgttgtaatcgatgaactccctaagcaaaattgatgaatacacagcacccaaaaacattcttctataaagaagacctttatccacgcaaaacaatgaatagtcaattcaccaagccgtccctatgcacaacctttatggtgtatatacatggttaatcgtattttaaagacacctcttaagaaggatttagct

SEQ ID NO: 53205 - DNA, 327 bp, Glycine max
  Clone ID: LIB3167-040-P1-K1-F8
gaaaaacaagtagttgagaactaagaagaaggaaatggcttcctcaatgatctcctccccagctgttaccaccgtcaaccgtgccggtgccggcatggttgctccattcaccggcctcaaatccatggctggcttccccacgaggaagaccaacaatgacattacctccattgctagcaacggtggaagagtacaatgcatgcaggtgtggccaccaattggcaagaagaagttcgagactctttcctacttgccagacctcgatgatgcccaattggcaaaggaagtcgaataccttctaaggaaaggatggattccttgcttgga

SEQ ID NO: 53206 - DNA, 226 bp, Glycine max
  unsure at all n locations
  Clone ID: LIB3167-040-P1-K1-F9
ggaannccgggccgaccacgcgtgcgggtctatatctctctctctctctctatctctctctttttttttcctttcttcctatcttgtgatctagggatgattgagaaaaacggaagtgtgaaattgcgcgtgtatctggttgctaattcgagtgctattagtctgtggtttggttggttttgtaaccttcctactttggtttttgttttgattggattttttatcc

SEQ ID NO: 53207 - DNA, 390 bp, Glycine max
  Clone ID: LIB3167-040-P1-K1-G1
cacgcgtccggagataactagaaacagtgtgatgaaaatgattgtccttgttttcttcgttgctacaaggggggtagcatggcaatgccatgcgtacgatatgttccctctccgaatgaacactggctatggtgcccgtactccggaggtgaaatgcgcaagttggaggcttgctgtggaagcacacaacatctttggctttgagaccattcctgaagagtgcgttgaagcaacaaaggaatacatccatggcgaacaatatagatcagactccaaaacagttaaccaacaagcttacttttatgccagagacctcgaagtccatcccaaggacacatttgtgttcagtatagatggcaccgtactctttaatatttcatactacaaaaa

SEQ ID NO: 53208 - DNA, 360 bp, Glycine max
  Clone ID: LIB3167-040-P1-K1-G10
caacaacactcatcagagggaaaagtcgcgcccactgccaccgcgtccaaagatgatcgagggggaagatctgggtttctttgccaattttcttggcgtcttcatctttgtactagtgatcgcgtatcattttgtcatggctgacccaaagttcgaaggaaactagtaatgcttttaagtttaagatgtaattttgtgttgtagacttgggaatgtgaacgttagcttactaaaacttccataaacatcaaaggagcataacatttcaatttttgctatacttatgcgtgctcccttaagttatttttgctgttaaggagtgtttgttggtaaactaatgaaaatactggattttctttt

SEQ ID NO: 53209 - DNA, 472 bp, Glycine max
  Clone ID: LIB3167-040-P1-K1-G12
ctatcatctaaaacgctctcaaagagccgaattacctgaaagcttcatggggtttcctgaatggggctgtcaaaaaacccagggtgtgctcttggaatggttgtagtgctatggagtttgtttgtgttgttgcttggattggatagccatttgagtgaggtgtctggattacttcctcttggcttgtttttataatcttggtaaagatggttctgcatagctggatttccagctctcatattcttgttaatttcttgctgctgcttggttgtggcataacctacgggactgacactgatatcttctgcttgaaaagtatcaaagaatcccttgaagacccctataattatttgaagttctcttgggatttcaacaacaaaactgaagggtatatctgcaggtttaatggggttgagtgttggcaccctgacgagaacagggtcttgaatctcaaactgtcgaatatgggact

SEQ ID NO: 53210 - DNA, 394 bp, Glycine max
  Clone ID: LIB3167-040-P1-K1-G2
cccacgcgtccgaacactcataacacaaagcacatttcaaagctcatccttgagttaaaaaggggcagcagcttcttccatggctctctcatccccatccttggctggcaaggccgtgaagctgggcccatcagccccagaagtgggaagggtgagcatgaggaagaccgtcaccaagcaggtctcctcaggaagcccatggtacggcccagaccgagtcaagtacttgggcccattctctggcgagcccccgtcctacctaaccggtgagttcccaggcgactacggctgggacactgctgggctttccgcagacccagaaaccttcgccaagaaccgtgaactcgaagtgatccactccaggtgggccatgctcggagccctgggctgcgtc

SEQ ID NO: 53211 - DNA, 217 bp, Glycine max
  unsure at all n locations
  Clone ID: LIB3167-040-P1-K1-G3
cgacccacgcatccgaggacacttacacacactcatatttcaaatattagtctcatacccacactnactaaaacagttcgataaaaaaagggagggagctctcaaacccatcaaagtgaatcaaccacgccatcatcagaatatcactcacagaagcataaagaacgagcatgatgaaaacttacatcaaacactttatgaacgacacccatagtac

SEQ ID NO: 53212 - DNA, 457 bp, Glycine max
  Clone ID: LIB3167-040-P1-K1-G4
cccacgcgtccgcccacgcgtccgaacagaaacaaaagtgcaagaattaggtggcatcaccgaggtgcatggagctgccaacagcgtcgagatcaacaatctcgctcgctttgctgtagaggaacaaaacaaaagagagaattcagttctggagtttgtgagggtgattagtgcaaagcagcaagtggttgctggagtgaattactacataacattggaagcaaaagatggtttgattaaaaatgagtatgaagcgaaggtttgggtgagggaatggttgaactccaaagagttgctagaattcaagccagtcaatgtttctagcacaccaataggtggcattaccgatgtgactgcgaatagcctcgagatcgacattctcgctcgttttgctgttgatcaacacaacaaaaaagagaatgcaaatctggagtttgtgggggtgattagggcaaag

SEQ ID NO: 53213 - DNA, 473 bp, Glycine max
  Clone ID: LIB3167-040-P1-K1-G5
tgtttctgtaaccatggcatccaccactctatcccctacaaccccttctcagctatgctcaggggaaagtgggattttcagttcctcacaggcacttcttgtgaagccagtgaagaggcagatgatggggaagagcaagggattgagaattgcatgccaagccaccagcatttccgctgatagagtccctgacatgggcaaaagacagctcatgaatcttcttcttcttggtgccatttcactccccactgctggaatgcttattccctacacctacttctttgtccctccaggttcaggttcttcagctggcggtactgttgccaaggatgccgttggaaatgatgtaattgccgagaattggctcaaggcacatggacctggtgaccgaacccttacacaaggattgaagggagatcctacctatcttgttgtggagaaagacagaacccttgcaacatttgcaattaatg

SEQ ID NO: 53214 - DNA, 495 bp, Glycine max
  Clone ID: LIB3167-040-P1-K1-G6
gaccacgcgtccggaagaacttagctacaagctaaggaaggatcaaagagaatgtctcaagcaatggcatcaatgacgagcttacgtggttcctctcaggctgtgttggaaggtagccttggctccacacgcttgaatgtggggagtggaagcagggtggcctcagtcacacgtgcagggttcacagttagagcacagcaacaacaagtgaatggtggtgaggtacaaagtagccgtagggcagtgctttcacttgttgctgctggtttgaccactggctcttttgttcaagctgtgcttgctgatgccaaacctatcaaagttggaccacctcccccaccttctggcggattacctggaacattgaactcagatgaaccaagagaccttaagctgccattgaaagataggttcttccttcaaccattgtctccaactgatgctgcacaaagggcaaaggaatcagccaaggaaattgttggcgttaagaagttg

SEQ ID NO: 53215 - DNA, 322 bp, Glycine max
  unsure at all n locations
  Clone ID: LIB3167-040-P1-K1-G8
cttcgggcccatggaaaaatccaggagcaggtgctagttggttttgtaccatgaagagtgtggaaggagagcgtatgatttaaatgactgaatgccggcttttgatggttaactgctattcaagatgttgtctatggttacaagtatcataatagggcctgggacttttgtttgtgttacatttgtttctactataataccttatgaagctaccttgaatattagtaattgtggagcttgtaatctttataggaacatgtttgtttggataagttgaatgtatgttgcaatcacncnctcaanangcangnaaggacccttt

SEQ ID NO: 53216 - DNA, 382 bp, Glycine max
  unsure at all n locations
  Clone ID: LIB3167-040-P1-K1-G9
agccttcgggccaacggatactttatatataaaatatccaaatattctatcataaccacattcatgtatagaggcggcaccctgccattacaggatgagagcaaatcaaactgcattgtacacgaaggggttcatatacaaatttggattctggaactgcagttcgtggaagctttgttccttaggtacctttaattttttccttctcgacaaatataaatatatatcataaatggttttttttttaccacactcttttaatttaacacgaccatngtgattttgaggattgagtccctgaaaaatttgtttgttcctgattattgcctgcaaaattcttagcttttggtcattattaaagagaatggtatgcttggacttc

SEQ ID NO: 53217 - DNA, 393 bp, Glycine max
  unsure at all n locations
  Clone ID: LIB3167-040-P1-K1-H1
gtcgcccacgcgtccgcaggtgactatggttgggacactgctggctttctttgacccagagacttttgccaaaacggtgaactgaagcatccactccagatgggccatgttgggagccttgggctgtgttttccctgaactcttgtcccgcacggagtcaagtttggnaggccgtgtggttcaaggccgggtctcagatattcagtgagggtgggcttgactacttgggcaacccaagcctgatccatgcacaaagcattcttgccatctgggccacccaagttatcttgatgggtgccgttgagggttaccgtattgctggtgggcctcttggtgaggtgactgacccaatctatccaagtggcagctttgacccattgggccttgctgatg

SEQ ID NO: 53218 - DNA, 212 bp, Glycine max
  Clone ID: LIB3167-040-P1-K1-H12
cccacgcgtccgcccacgcgtccggcatttgaggctgttgttgatatagatggggatatacttgaaattttggttgatgaagttgtgcaagatcttgcaggttgcaagcaaggcaccattttcttctaaaattcctttcagctgattcatgcaacatctcaccagtcatttctctggcgagatgttgtgatctaacatggtgtatttttttg

SEQ ID NO: 53219 - DNA, 186 bp, Glycine max
  Clone ID: LIB3167-040-P1-K1-H2
catcttctccttcctcctcacttgaagagctagagctgctgtcagatcggtgaagctgggctaagaggctgtgcttgttctctccttggtctgagacagtgcctttttgaaattcggtggcgatgacctcctcctgaggatgaggctggccttcttaatcctttttttaaccgggaaggtcaaaac

SEQ ID NO: 53220 - DNA, 328 bp, Glycine max
  unsure at all n locations
  Clone ID: LIB3167-040-P1-K1-H4
tatacactattcaaataggaacattagctatgttatctaatttcactttatnttatggggttgattcacttaagacactgcacgtacctacattttttttctttaccaactttaataaactttcttccctttttccatattttttaaactttattatataattatattttttttttatattataaatatatttttttcttaatataattacttgttccctctttttttaatttttccattcttacattccttttttaattcacattccataattttttttatttcttttatcatcttttaattcaaatatatcttttcccttcttttt

SEQ ID NO: 53221 - DNA, 216 bp, Glycine max
  Clone ID: LIB3167-040-P1-K1-H5
gcatattgcagtaaaacaaatcagacactaggaatcagttctctacatctttcaatctagttagaaagtgtttattatgcatctagttaaagtagtctgttttgttggcagaaaaattgactgatgtttgtagtgtatgctctcgatcaatatggaaacagaacaatttgcagtcttgtgttctttctattggatgaatgctcacaatttttgttc

SEQ ID NO: 53222 - DNA, 340 bp, Glycine max
  Clone ID: LIB3167-040-P1-K1-H6
cccgcggcgtctggttgcagggaaaaagaaaaataaaaggtttcgatataccaacttggattcttgagggagacggttggcatctcgacatgattcttacattaatggccaatgaaaagccacttgttctatacacttctgttaagcctattacaatcatagcatagctaagtgactgaagcgactttcaagatatgaggagggattgcaagcttgcaagaagcaccaagtcatgtatgactattccgcacctaaagaggtgagattgtagacagattgttgaagcattgagggccaagttggatcctttgggtagactggtgtctcttgagaatggaaa

SEQ ID NO: 53223 - DNA, 392 bp, Glycine max
  unsure at all n locations
  Clone ID: LIB3167-040-P1-K1-H7
aactcgaagtgatccactccaggtgggccatgctcggagccttgggctgcgtcttcccggagtgggggtcccgcaacggggtgaagttcggagaagccgtgtggttcaaggccgggtcccagatcttcagcgagggtgggctcgactacttgggcaacccaagcctgatccacgcccagagcatcctcgccatctgggccacacaagttatcctaatgggtgccgttgaaggttaccgtattgctggtggcccnctcggtgaggtcactgacccaatctacccaggtggcagcttcgacccattgggccttgctgatgacccagaggcttttgctgagcttaaggtgaaggaactcaagaacggacgattggccatgttctctatgtttggc

SEQ ID NO: 53224 - DNA, 438 bp, Glycine max
  Clone ID: LIB3167-040-P1-K1-H8
cccaacccaatcttcaccttcgcccacaacaaatcccattcctgcatctcctccttcagcatcggtggaaactttactttccatttttgtccttcctccccgagaaaaaaatggcgaacgcagcatctggtatggccgtccatgatgactgcaagctaaagtttttggagctcaaggcgaagaggacgtaccggtttatcgtttttaagattgaggagaagcagaagcaagttattgtggagaagctgggtgagcctgcaaatggttatgatgatttcgctgccagtcttcctgccgacgagtgtcgatatgctgtttatgattttgattttgtcactgaagagaattgccaaaagagcagaattttcttcattgcttggtcccctgatacatttagggttaggagcaagatgatttaatgccagctccaaagataga

SEQ ID NO: 53225 - DNA, 310 bp, Glycine max
  Clone ID: LIB3167-040-P1-K1-H9
gatgatcttattttagcagttaggggaagattgtattgagatgtgaggaaaaaatgggtagacgggtgcaggtcaaaaagggtagggtcttaggtctagtaattgtaggtcccttaaggcattaggagttggtgtctcgcatgttacttcatgttactggaatggatctcatgctaagaggcgtacctatttccttttaagattgtgttttcgcatcatgttttgtgatatctgggtgagccttcaaaggttatatgatttcgctgcagttttctgccgcgagtgtcgatatgctgtttatgattttgat

SEQ ID NO: 53226 - DNA, 412 bp, Glycine max
  unsure at all n locations
  Clone ID: LIB3167-041-P1-K1-A10
ccgggtcgggccacgcgtccgacagcacaacacaacacaaaaccctttcccaaatattttaaaaaataaaaaatgtaggaagggacgtttttttataaccgaccagcggaagcgagttcncgacgagtcggactcggtcctcaactcgcccgactcgttaaagcatccccgagccgagtctaacttgttcgagtctctccgagttgactcggacgagtttgaactcgcgcggctcgacccggttcttctcaacatgctgaatgacgcggagaatgtggcggagcgtgaacccaccgtgcttgactctgttattaagagtttcgaagaagaaatactttctccggttccgaacccgaacctagcatccgaggcagatgtgtttaagccgaacctatggtacttattggaagca

SEQ ID NO: 53227 - DNA, 324 bp, Glycine max
  unsure at all n locations
  Clone ID: LIB3167-041-P1-K1-A12
cgcaccggcaggaagaaacacaaaccncaaatttgtttcaaaccnnacngannnnangggcaganttgtatattacaccatagatggtcactataaatatttggtgcaacaatttcacaggaagaagtttaagtacactcgcccatacctgatttaattgatgttctcagacaacattcaaatctcaaatctaactctcctcaattccccatcatgtaatgttcatcctttttacattaccaatattattgtgcatggcatcaccatttttgctcctgacacatcttctaacacttatttcatcaacccagattcttgcacaaa

SEQ ID NO: 53228 - DNA, 453 bp, Glycine max
  unsure at all n locations
  Clone ID: LIB3167-041-P1-K1-A2
aagaacgagagtgctgtagttacctctgctcctcagaagaggattgaggtatgcatggggaacgagtgcgaaagatcaggggctgctgcattgatgcaagagtttgagaaagtggtgggtgttgaaggtgtagctgttgttgcatgcaagtgcatgggcaagtgcaaaactgctcctaatgttaaagttcagaattctgttgatcataatagcctggctcagggacttgatgattctgttaagattcctgctaaccctctatgcattgnggttggcttggaggatgtggatgccatcgtggctagatatttttgggagagtcacacagatataggcatggcaggtgcaggtgcagctacagctacttgatgttgtgggaatggctagtgtgttatttgtaattatatatatacgtagtcaggatgccgaggaaacattatngacaatggtttt

SEQ ID NO: 53229 - DNA, 436 bp, Glycine max
  unsure at all n locations
  Clone ID: LIB3167-041-P1-K1-A3
cccacgcgtccgcccacgcgtccgcccactcgtcctgaattactgaagagcttccttcaatggcggtgtcttctctctctgttactcctctttcnctctcaaattcttccccctctctatcttccaagccaaagtttccatctttgtgttttctctctggcaacaacaccacattgagggtaacatgcccaaaacctctgcactcatccactgttgttcatgttgctaccgaagcgttggattcatcccctgatcccttggacccacctccagaaacccttgatgatgactctgacgccaccacctttgaggttggtgacttggggactcctagcacttcagcaattagcattggtggcgatgcagatacaatggcaccaaagcagaagattagaatcaagcttaggtcttactgggtgcccttgatagaggattc

SEQ ID NO: 53230 - DNA, 442 bp, Glycine max
  unsure at all n locations
  Clone ID: LIB3167-041-P1-K1-A4
ggcattgataatcatagctatggcaactgcnagtgcaatttgtgcggtatcatttagaaacancgtctgtgtgagtaaaccctcggatcttgggttcttgagctctcgtctgaacggcctcagaatctgcttccccaaattgccacccacacccctcactgcttctcccttccccacacccctccctatcgttgccaagagagtgtgtcccttcactggaaagaaatcaaacagggccaacaaagtatcattttcaaaccacatgacaaagaaactgcagtttgtgaaccttcagtacaagaaaattttggtgggaagcagggaagcgctacgtaaagcttcgtttgtcaactaaggcattgaagacgatagaaaagaatggacttgatgcagttgcaaaagaggctggaattgatcttaggaagaaataagcctatctaat

SEQ ID NO: 53231 - DNA, 335 bp, Glycine max
  unsure at all n locations
  Clone ID: LIB3167-041-P1-K1-A5
cgtccagncaagaactaataangataagcataattcttccttttttttctcttccccagcttataccacttgcaatttttctcaaaaccggcgtggtagctccattcactgtcctcaattccatgactgacttccccaccataaagaccaacatttacattacctccattgctagcaactctttaagagttcaattcatgcacatgtttccaccatttttcacgaagaagttatatactttttcctaccttccagaccttttataatccacaattttttaaatcaactttatatacctctcttaaaaacataatttaatttttttgcttttttaa

SEQ ID NO: 53232 - DNA, 376 bp, Glycine max
  unsure at all n locations
  Clone ID: LIB3167-041-P1-K1-A6
ccaggcgtccgagagctttgaaacatagcancattcacttttcactttttttcaaacaaggccttcttctccacctgttcacattttattgcatcatcaccatccatttacattgttagctcctcttaatggttatggcaactgtcagatctgaacctgcttgtgcaagaacggttcatgatgttgcatcttctttcagctctaaatggcagcactcttctacgtttaagaagcatccacgtgctcgaattcctcaatgttctctcaggattagagcttgtacttccatggctaacaaaaatgacatctacaaccaagtgggtttatttttctctaaaaaggtaattagaagattcatttctttgtgcttaaatgt

SEQ ID NO: 53233 - DNA, 257 bp, Glycine max
  Clone ID: LIB3167-041-P1-K1-A7
cgatcatgacgctccatcatacagaaaagatactgcatggcttttgcaccaaccttaccgtctagacggatgcggacggcgtgcgcaccatccgcctggaaggccgcggcaagctcaccggccaagtcatctacgtgccgtgcgacccgtcctcgacggccttcccgcttgttgcggccctgcttgttccgggctcctacgtcaccattcttaacttgcttattaaccctacccgcaccggcctttatccttactct

SEQ ID NO: 53234 - DNA, 460 bp, Glycine max
  Clone ID: LIB3167-041-P1-K1-A8
gcgtccgcccacgcgtccgctcagagtgaaatgctagttaatttcaacgtgccccatgagaccttgtctcgacagatgattcatgtgcaacatgttccaaagtgtgtgtcggataggttgctagagaagttctatgatgagtcagagttggatttcgattacgagcaaagtggattgtggtctcctccagttccacgcacggtattcttgagctcaccggggagaatattcactgagcaagaaatgcttgaaagactcagaagcaaaaatgcatcacgaagacgtggcaaaagattcagagtttgtttcagtgtgttatgttgtgcctgacagtgaatgtaaacaaaagcgggaattgaaggtttttcagcaatgctttcttgttagaatacaaatggaattaatccaaaaatttcctatgattgtttatcatattcacaagaatttaatgttttttttt

SEQ ID NO: 53235 - DNA, 72 bp, Glycine max
  unsure at all n locations
  Clone ID: LIB3167-041-P1-K1-A9
cccccntaacttgtatatccttacaatgattacaataatactgtcccaataccaacaacattctctcaccaa

SEQ ID NO: 53236 - DNA, 247 bp, Glycine max
  Clone ID: LIB3167-041-P1-K1-B1
cccacgcgtccggctggtggtacctcactcaaatctatttcctcttcaggcaagtctgaagtggatggttttattatcccatcagcgctgatagtcaatccactctcaggctgaaaccttagcatgtctgcacgagccatagcttctgcttgggctattctctgtctgaatgtctgagccatcttctccgccttctcaaagacaagctttgtattgcgaatcatgtcttcagttgtgtgctctaact

SEQ ID NO: 53237 - DNA, 349 bp, Glycine max
  Clone ID: LIB3167-041-P1-K1-B10
gaaaatagctcctccggcggaggttaccggaaaattgatacgaataagagtcaagtggtgggggtgccttcggtgtgctcttaccggaagaagaacagcatgaacgaaggtgcttcaaagatgtacgtgaaggttagcatggacggtgctcctttcttgcgtaaaattgatttgggtctgcataagggctactcagatttagctttggctttggacaagctctttggttgctatggaatggtggaggcgttgaaaaatgcagacaattctgaacacgttcccatttatgaggacaaagatggtgattggatgcttgttggatatgttccttgggaaattgttattggag

SEQ ID NO: 53238 - DNA, 458 bp, Glycine max
  Clone ID: LIB3167-041-P1-K1-B12
agaaaagatatcacccacttgctactttatattttactgcaaattaaatactctcgtgaatgactaactactatttaattgcttgcgccattaccaatgtttttatcctgcaaaacatacatagtagtagtatttgatatttgctaggatttcaggtgtgcagctgaaaccttcgtgtcccacgaaaaccttacaaaattgaattgtggtattacagtatccaacagcaccattctggattctgccactccccatgacaaaatcaccacatcaacttttggctttgtacttgaagattttcctcatttatctgcttacatcccttaccttcaaacatattcttacccttttcaagacaatcctttctattctgttgttccgcaatattacgttaatgtggatgatacaatttctcaacatatagttgtacacaaaaatagttcaagatgtacccattt

SEQ ID NO: 53239 - DNA, 460 bp, Glycine max
  Clone ID: LIB3167-041-P1-K1-B2
aactagttttgttttgggaacatcatcacattacattagattggtggtaatggcagcgtcactgcaagcagcagctactttcatgcaacccaccaagttgagcaggagcaacactttgcagcaaaagtctactcagtccatttccaaggcttttggtttggaacctgttggagctaaaaaggtcacatgctcccttcaggctgatcttaaggacttggctcacaagtgtgttgatgctaccaaaattgcaggattcgcccttgccacctctgccctcgttgtctctggggcaagtgctgaaggtgttccaaagaggctaaccttcgacgaaatccagagcaagacctacttggaagtgaaggggacaggaacagcaaaccagtgcccaacaattgatggtggattggactcatttgccttcaagccggggaaatacaatgccaagaagttatgccttgag

SEQ ID NO: 53240 - DNA, 334 bp, Glycine max
  Clone ID: LIB3167-041-P1-K1-B3
cccacacgtgcgattgacttgcccgcaaagccatggtcaatgcagatggaattatagagaaagcgtgggcgtggattaggtactctatggaaataacccttgacatttacaaggactggagtggcactgatcaagcgttacctaatgatctaaggaagagaggagttgctgataagagaccaatctgctgctcatggagttcgtgcattgattgatgactattcttatgcttttgatgggctagagatatgggatgccatcaagtcctgggtgcctgaatatgactcattctacgtacacgtagatggggaactccaaagagaccctgaactgc

SEQ ID NO: 53241 - DNA, 292 bp, Glycine max
  Clone ID: LIB3167-041-P1-K1-B4
cccacgcgtccggtaaacatgtacctgaaggtttgtgtataacaggaactcattatagtcaccgtggggatcaatatttatggtgtgggggcaattgagtctcgagtgttttagttgtgaactctgttgttgcgtgattaaacaagtctgagaagaaaaacaaattagtccaaccttttgtttgtttctggaagttagttatattaagttgtgttttttgcattaagggggtttttgtcagtgatatgtactagaggtagatttatgtcaatgatatatgttaattttattc

SEQ ID NO: 53242 - DNA, 273 bp, Glycine max
  Clone ID: LIB3167-041-P1-K1-B5
gcgtccgattattcatccatagacatggccaccgtcacttctttattttttgctattccctcattcactcccgtcattttatgcgcaggcagagtgagcaccacaattaaagtctcatctccccaagccacaaggttgggcatcaaggctacgctgaaagacgttggagtcgctgttgtggccactgcctctagtgcagagcttgctagcaacgccatggccattgaagtgttgctgtgtggtgatgactgatctctaccttttcgttcccaa

SEQ ID NO: 53243 - DNA, 453 bp, Glycine max
  Clone ID: LIB3167-041-P1-K1-B8
cgggccgacccacgcatacaaccaattattataagccattcactcacgtttttttttaaaaaaaaacatataataacaaaggcagtgttattcacagactcgaattgtacataaacattcttcaactcaccatataattcctcatgatcttcactcaaacacttctcatacttcagcatataaccctatatcctctcctaattattaatcttgcaagtacacctcttcctttctatgactacctccactgaatattaaatagcatctctatattaattactttctagctttcttttcttctatcaaattccacaattttctatagaccctgttatttcttacctttttctatcatcaatctcttatttattcaaacccacactattttctttttaattaataattattcctcttcttttttatccattttttctttctacatttttttttctt

SEQ ID NO: 53244 - DNA, 474 bp, Glycine max
  unsure at all n locations
  Clone ID: LIB3167-041-P1-K1-B9
cggggcgagcgacgcgtccgcccacgcgtccggatagtgtgagatggcagtttcttatatatattccagttgcacaagggggcgatgtgctattgaagggtggaaagcctcntgttgctgattttgttcatggtaaagatggactagggaacacattcctacccccacctaaaggcaatcaaaagggattcttcctttgcaagcaaagtgaagagaatagttatacttggtggtgcattctttgccttggggaatgtgaatcctgctgcagaagccaatatccatggagacccggaagccgcatatattgtgtttacctctggggcagatattgttgttattggaataaacattacaacccaagtccaattcacagatgctgatctcctcgaactgaaggaatctaaaggaaagtatgctcccttcttgagtgacatatgcaaattctatagggacttttatgtaaaatctgat

SEQ ID NO: 53245 - DNA, 462 bp, Glycine max
  Clone ID: LIB3167-041-P1-K1-C1
cccacgcgtccgcccacgcgtccgcccacgcgtccgactgtgatgtcctcctaaaaaaactctatccgggtctatgatgtctctcacaaccgtggctgcattcaagtccctcacaatggcggaatcgtgccttctatccctcccttccctcttctacgccaaaaacaataccctttctctctcaattcccaccaagcccctcaacctccatcttccatgctccaactcttcgctctttcccctcaccaccaaaacaacgcgccactcttctctcctcacattcgtggctcagacatcggattgggccaaagaagaagaggaagaagaaacctcgtgggagaaccaaggcgacaccgcgtggggaactgaagaaggtggccacgaagaagggggtttcgcttaaaaagctgaggaagataagatcttcgttgggaacttgcctttcgacatcgacagcgagaa

SEQ ID NO: 53246 - DNA, 457 bp, Glycine max
  unsure at all n locations
  Clone ID: LIB3167-041-P1-K1-C11
cccacgcgtccgcttttcagcaccttaccttattccaatccaatagcaaggaggtaccaaagtagtgtgattcatggctgcaacgaatgcgtcaatctttgcatcttccacgcaaccatgcttgcctgtgcctcctaccattccaaacacgcttgctactccttttctcaatgtttcgtcaccaagaagttaccttgtgaagaaaaagcatgtgaaatttagcaaaaaaatcagtgctgctgctgttgcaacaacaacaacaactgaggaaattcaagagtacaagcttccatcatgggctaagtttgaaattgggagggctgctgtctattggaaaaccatgaatggcctccctcctacttcaggagaaaagctaaaacttttctataatccagctgcaactcaacttgtccctaattgaagaattggaattngctttaatggaggttttaatcag

SEQ ID NO: 53247 - DNA, 373 bp, Glycine max
  Clone ID: LIB3167-041-P1-K1-C12
gggccgggccacgcgtccgggagattctatcttttatggaggtccattttttatttcccctggaaaagatgagtttgagagaggaatgacatttggcatgcgactgatgcccaataggccatcatatcggcgaacttgcctcaagagccaagatataaaaggaatttactctcaaatcagcttcctgtgtttgtccctggtgggtttgagaatattcttcaacctcgatctggcatgaattagcttatgttgttttgagattccaatgagtggacaaagtttttgttggaatcgagaggattgtgaagagcaattaaaagggtctatgtggtaaacaccgttttagcctttcagaccatacaaatgaaaagta

SEQ ID NO: 53248 - DNA, 460 bp, Glycine max
  Clone ID: LIB3167-041-P1-K1-C2
cccacgcgtccgatagcccaagccctatacaaccaaaccctaacacacacccatttgattcagggtcgatggctagcctcaaggttgcatttttggctgcagtgctctgcatggttgtggtgagtgcacccatggcacatgcagctatcacgtgcgggcaggtgacgagtagcctggccaattgcatcggttacctccagaagggaggaacgccgtcgtcgggatgctgcaacggagtgaagagcctcaatgccgccgccaagaccaccgccgaccgccagacggcgtgcaactgcctcaagtcggccgccagccaaatctccggcttcaacgccaacaacgccgcctcgctccccggcaaatgcggagtctccatcccctacaagatcagcacctccaccaactgcgctaccatcaaggtttgaagagaaagtcatggacgcaggaaaccggaaactac

SEQ ID NO: 53249 - DNA, 337 bp, Glycine max
  Clone ID: LIB3167-041-P1-K1-C3
gtccatgtttcggtactggcctccatccaaggcatctgacactgatacccatcgtaaactccgaccgggtaacaaacctgtggcaatttcttgacatgattcccgcagctttgtgaaggtgatgaaggtttccagatacggtcgtttgttctaaattgttagcttgagctgactttgcacacagtttgggatgaatatcttattcattgatacaaatttgtcgatgacctaataataccattaagcgttcattagtgccatctgagatgtatttctattgctgaagtgcggggagaaaaaaaagaattaaaaaagcatgatgattttgccccccccc

SEQ ID NO: 53250 - DNA, 466 bp, Glycine max
  unsure at all n locations
  Clone ID: LIB3167-041-P1-K1-C5
cgtccggcaactgcnattttggatcggaacctcttctgcggtgtatcaatgggacactccaacgtttttagttcttacctaaaaaactacggtcctggttctcgcacttgccgagtgtgtgggaatccacatggattgatcaggaagtatggccttatgtgctgcaggcagtgcttccgtagcaatgccaaggaaattggcttcatcaagtatcgctaaaagagctgttgtcacctacggaccaatattatgttctggcactaggatgttttgaagatgttatgtttgaagaaacttgagacttgtttttttcatgtattttattatcatactttaatgtgtggaacgaataatacttttatataaattgttttgcactattggctcttttattaatattaatatataatggtcttccttttttagagatcttttcttactactctgtcattgcttattattattt

SEQ ID NO: 53251 - DNA, 431 bp, Glycine max
  Clone ID: LIB3167-041-P1-K1-C6
agaacaaaatcgcgagcggccccctttttttttttttttttttttaaaaaaaaaaaataatcaggttgtgttttttacctcaaagaaaaaaaaaaaaccaaaaaaaaaaaaaaaaaaaaaaaaaaaaaaaaaaaaaaaaaaaaaaaaaaaaaaaaaaaaaaaaaaaaaaacaaaaaaaaaaaaaaaaaaaaaaaaaaaaaaaaaaataaaaaaaaaaaaaaaaaaaattaaaccataaggcccccccctcataataatcccaaaacaaccaacccctataaataaaaattaaaattatttataaaaaaaccttcaaaaaaaaaaaccctcccccccgatttataacaacttaaaaaccctataaaaaaccatatacactcccaaaaaaaaaatcccctataaaaaaaaaaaccccacatttttctcaaaat

SEQ ID NO: 53252 - DNA, 437 bp, Glycine max
  Clone ID: LIB3167-041-P1-K1-C7
ccggggcgggcgacgcgtccggaaattgtagctgcagaaaatttcttgtactgctttttaatgattttggagttcattgggttggttctgtttcggatcaaacacccccacacatcccgaccttacaagataccggggggaactgctggagcaattatcatgtgtatccctccgacaatattgattggtgtggtgttgtttttctccacccttaaagtaatggttgtaagccttattgctatggcaattggccttctgatgcagtcttgtctcaaatttgttgagaagaatagatggatgaagttttcccatagttcttagctccctgattttggcaatcaataggacactctcactttggtgcattaatctgtccttgttcaaaaatatggagatgattatttcttttaggtcttcaagccatgtttgttaagttt

SEQ ID NO: 53253 - DNA, 336 bp, Glycine max
  unsure at all n locations
  Clone ID: LIB3167-041-P1-K1-C8
ggaggagctaatcacactcagggacgaggtctccatatacatgattgaaggcaacctganaggtttcaattcggttagatgtgaaagagactgaaggatattcagtgctacagaggaataaggcatattcaggggcttccttgcagaggccagcgaaccaagaataattgcagaaccttgaagggtaagaaggttgccattgccggtaaaaagaaaaagtaaacggctcctattttttgtgatgttgttttctaattgtcaatgttgtaaggaaaagaataataatgttttctatataattcaattgtttttgtttaagttgtacttggaaataca

SEQ ID NO: 53254 - DNA, 318 bp, Glycine max
  unsure at all n locations
  Clone ID: LIB3167-041-P1-K1-C9
acagctctgtatttgggtttacttggattatttttatattaactcaaatatatccanttggcggtctttctatatttgtggctatatctccaaaacacttcttatccctgtgattcacaatctatgtatatcgatttttactttaaatgcaaatttttactttgctactgctatttcttatgtttgctttcatatcattctcttattttacagtgttagtgccattcttaatcattacataaaactcaccaatctatatactccaaaacttcaatacatcaaatcttgataactttaaaatgtacttttatgcttcaa

SEQ ID NO: 53255 - DNA, 348 bp, Glycine max
  Clone ID: LIB3167-041-P1-K1-D1
aaacactttcgtagtccatacattcacttccaagataatcttcactttctaccatgacactaggtcggcggacacactaatgctgaagatcaaatcatcccacgtagatacttgcaaaacaaccaacttgaccgaggttatgatggcagacttaagcgctataatatgcacgcttgcctttgctaggaagtatgatgacgacagctcacccaaaagcaagttcaatggtctgtttaacgactcgcaggctatgttgctcttgattaagaaacggatgacattatactcactgcacgtgacttgataaactcaccgtggtgggtactcgaaacaaaaagacactatagg

SEQ ID NO: 53256 - DNA, 73 bp, Glycine max
  Clone ID: LIB3167-041-P1-K1-D10
aaaaaaaaaaaaaaaaaaactataaacaatatatatttataacaaacaaacaaacaacaacgggcagcttaat

SEQ ID NO: 53257 - DNA, 297 bp, Glycine max
  Clone ID: LIB3167-041-P1-K1-D11
cccacgcgtccgcccacgcgtcctaaaaaaaaaatttataaaaaaaaaaaaaaaaaaaaagggaaagataatataaaaaaaaaaaaaaaaaaaaaaaaaaaaaaaaaaaaaaaaaaaaaaaaaaaaaaaagggtcgccccttttaaagaatccaactttacttacccttccttccaaattaaaaacttttttatagtttcacctaaattaaattaactgccccctttttaaaaacttttaaactgtaaaaaccttgtctttaccaaacttaatcctctttaaaaaaattcccctttt

SEQ ID NO: 53258 - DNA, 450 bp, Glycine max
  Clone ID: LIB3167-041-P1-K1-D12
gaaaaacaagtagttgagaactaagaagaaggaaatggcttcctcaatgatctcctccgcaggtgttaccaccgtcaaccgtgccggtgccggcatggttgctccattcaccggcctcaaatccatggctggcttccccacgaggaagaccaacaatgacattacctccattgctagcaacggtggaagagtacaatgcatgcaggtgtggccaccaattggcaagaagaagttcgagactctttcctacttgccagacctcgatgatgcccaattggcaaaggaagtcgaataccttctaaggaaaggatggattccttgcttggaattcgagttggagcacggtttcgtgtaccgtgagcacaacaggtcacctggatactatgatggacgctactggaccatgtggaagctgcctatgtttggctgcactgatgcttctcaggtgtt

SEQ ID NO: 53259 - DNA, 396 bp, Glycine max
  Clone ID: LIB3167-041-P1-K1-D3
ggcgtccgaggaatttcgatgctcatcatctctttaccattttttcttctgctcttgcagagagggcctttcatgcatcgctcctgaggaagattattggaagctgtttggccaaacactcccatcccactgcactgcagagcttctaaagcctctccctgaggtgttaaatcgatgaactccctaacaaattgatgatcacagtacccaaaaacattcttctataaagaagaccttatccagcaaatcaatgaaagacaatttaccaagcgtccctatgcacaaccttatgggttatacatggttaacggatattaaagacacctctaagaaagatatagttttgaagagatttgcattaaaaaataaacttttgagctatataatatttttttt

SEQ ID NO: 53260 - DNA, 362 bp, Glycine max
  Clone ID: LIB3167-041-P1-K1-D4
cccacgcgtccggtttgttgtgagctataagctagtttattgtgaggagaatatgaaattgggggtgttctttgttgctgcaggagttttggtagcatggccatgccatggcgcaggctaccaaaggttccctctccgaatgaaaactggctatggtgagcgttcttcggaggtaaaatgcgcaagttttaggcttgctgtggaagcacacaacatccgagcctttaaaaccattcctgaagagtgcgttgaaccaacaaaggactacattaatggcgaacaatttagatcagactctaaaacagttaaccaacaaagctttcttttatgctagtgaacgcgaagtccatcacaacgacata

SEQ ID NO: 53261 - DNA, 462 bp, Glycine max
  Clone ID: LIB3167-041-P1-K1-D5
atttggtcactgacctatcttggtagagatttgaagtttaaaccttcaaattaatcaaaccagggtggtttgcctttagattctgagtcactgctgctatggcgctacgcgtacttcttgtgttggggatgttgctgatgttgtgccttgttaaggtttcatctgatccaaagatagaagaagaaatactggaagcagaagaagaactgcagtttcccgataacgagccacttatcgtgagagacgcgaacagaaggctaatgcaagatatggattgtggtgggttgtgcaagacgaggtgcagtgcacattcgaggcccaacttgtgcactagggcgtgtggcacgtgctgtgtgaggtgcaagtgtgtcccacctggtacatctggaaatagggaactatgtggaacctgctacactgatatgaccacccatggcaacaagaccaagtgcccttagagaa

SEQ ID NO: 53262 - DNA, 371 bp, Glycine max
  Clone ID: LIB3167-041-P1-K1-D6
cccacgcgtccgatcgcaagcgccgcccttttttttttttttcttttttattttttatttctgtttgttttttttttaaattttgattccttttttttttaaaaaaacaataacttttatttattaattattaatttcaaaaaacccctataaatctcactccaatcccacaaaaacctcaaactttttaaaactaaaaaccaacaacaccctcccgaaatctatggtcttacccacaaaaacaaaaacagaaccccaaaacaacaacctgaaaggcttcccccttacaacaccaaatacaattcctataaataaaacaacattccccctcccaaaaaaacaccttcccccccatttttttttttctccca

SEQ ID NO: 53263 - DNA, 119 bp, Glycine max
  unsure at all n locations
  Clone ID: LIB3167-041-P1-K1-D7
gaancccggggcggcccacgcgtccaattaatgttcagccctctcattttaagctttttttttaaaaaaaaaaaaaaaaaaaacgggttgttttttttaaaaaaaaaagggggcccccc

SEQ ID NO: 53264 - DNA, 216 bp, Glycine max
  unsure at all n locations
  Clone ID: LIB3167-041-P1-K1-D9
gacccacacatccgatcaaaatttcctcaattattactattgcctttattatcacattagccctcncactagcttgtttttttataaaataccccgacctcaattcctaaaaccacatcattcttccctaccccttataacaattactactttatttctctatcaaacatctcaaatttacttacctatatttattattcacactattttttcaaa

SEQ ID NO: 53265 - DNA, 89 bp, Glycine max
  Clone ID: LIB3167-041-P1-K1-E1
cggacgcgtgggcggacgcgtgggtaaaattagggcagatgcttgtcgcactttaaaaaaggggggggttttaaaaagggggggggagg

SEQ ID NO: 53266 - DNA, 456 bp, Glycine max
  Clone ID: LIB3167-041-P1-K1-E10
gcaacgatgcgttggtgtttacctggcttgataggttgactaaatatgcctttagaaggtttgggattatttctaatgtgtgtcctacatgcaggtccctaagcttacatcctgcttctagatagttggtaatcttatctgagggtagtagctagtaccatgggagaagtggcagtaatgcactctgagcctctgcagtttgagtgcaatgacattaatgtgaatatgactgagatggaagtgtatcctccagaatcaaatgtggagcacttacctggagaagaatcgagtcaatcaacagaccacaaaaatatcaatgtcttgcaagagagaggatatattgaatgtcagcattacctgataagatgccctattagggccccatgttgcaatgtgattatttgtttctgacattttctatttttgttcaaacatttttttctccttttttcatta

SEQ ID NO: 53267 - DNA, 447 bp, Glycine max
  Clone ID: LIB3167-041-P1-K1-E11
gtcctgttgaagctgagggagtacgttgatgacacataggattacatcaacatcatgctggaggacaaacagaaccatctgctccaaatgggagtcatgttgaccacagcaactctggtagtgagtgcctttgttgttgtggccggtatttttggcatgaatattcacattgagctatttgatgaccagaaagctgggatgacacaattcctctggactgttggtggtagcactgcagggaccatattcttgtatgtggttgccattgcctggtgtaagcacaaacgcttgctagagtgaccaggcgtcaaatagtgtttcataaacaaatgtaatttaacttgaaaatcaccttttgttcatgtgctataaaatttagtagcagacagtgcagtatcttggtgcttcttgtactcgtatgatccttcaacttcaacggtgttgctc

SEQ ID NO: 53268 - DNA, 450 bp, Glycine max
  Clone ID: LIB3167-041-P1-K1-E2
ctcatgtcaacggagacaaagagtgtgagaaatcgaggggagaaagctgccaatccctcaacaggcagatgtgtcacatgaaggttagagacaaagagttccacaagaatggaaaattgaacaagagtagcaagaacagcagaagtggcatgcagttgttgccatctgggtcaaggagaatttttgacaagttatggattgtggggaaaggacaaggagaaaataggagctcagagacttcagggagttccaatagccctacttctgtagtccctggagataccaaatcatctggttcatcattgcgacacaggaggctttccatctcttagggaattttcgtaatttaaacaggcgaaggagagttaaattgctgtgaagtgtaaaaagtgttaggatgttaaatcttttgtgttattaatgcatgcacagaatcaggaaaaaggtctc

SEQ ID NO: 53269 - DNA, 436 bp, Glycine max
  Clone ID: LIB3167-041-P1-K1-E3
gcgtccggtttgttatcttcgtctaatgggtcttgtgagttagatgtgtggccttttgtccaaaacgtggggggcgacgttcttgctcgtgcaggctttggaagtagctatcaagaagggaaaaaaatattcgaacttcaaagggaaatgattcagcttacaatgacgctctttaagtttgctttcattccaggttacaggtttctgccaacgcataccaacaggaggatgaaagcaattgacaaagaaatacgagaatcacttatggtaatcatcaaccgaagattaaaagcaatcaaagcaggggagcctactaacaatgacttgttaggcatactcttggaatcaaattacaaggaatctgaaaaaagtagtggtggaggaatgagtttaagggaagttgtggagaagtgaagctattttacttggcagggca

SEQ ID NO: 53270 - DNA, 460 bp, Glycine max
  Clone ID: LIB3167-041-P1-K1-E4
ctgacctatcttggtagagatttgaagtttaaaccttcaaattaatcaaaccattttaatttgcctggagattctgagtcactgctgctatggcgctacgcgtacttcttgtgttggggatgttgctgatgttgtgccttgttaaggtttcatctgatccaaagatagaagaagaaatactggaagcagaagaagaactgcagtttcccgataacgagccacttatcgtgagagacgcgaacagaaggctaatgcaagatatggattgtggtgggttgtgcaagacgaggtgcagtgcacattcgaggcccaacttgtgcactagggcgtgtggcacgtgctgtgtgaggtgcaagtgtgtcccacctggtacatctggaaatagggaactatgtggaacctgctacactgatatgaccacccatggcaacaagaccaagtgcccttagagaaacaaaaa

SEQ ID NO: 53271 - DNA, 463 bp, Glycine max
  Clone ID: LIB3167-041-P1-K1-E5
gcattgcatccctcttgatttgtagtttgttttgtgctttagataaaagttctgccaaatcaggatgtgttttaagatcatagtgtgtgttttgcaacaatggctaagttctttgctgctatgatcttggcactctttgccatttccatacttcaaacagtggtaatggctgctaatgaacaaggaggccacttgtatgacaacaagagcaaatatggaagtggaagtgtcaagagttaccaatgcccatcacaatgctcgaggagatgtagccagacccaataccacaagccctgcatgtttttctgtcagaagtgctgcatgaaatgcctgtgtgtgcccccggggtattatggtaataaagctgtgtgcccttgctacaacaactggaagactcaagaaggaggacctcagtgcccttgagctttaacttgatcaatttaattgtcgtttcccacatttt

SEQ ID NO: 53272 - DNA, 368 bp, Glycine max
  Clone ID: LIB3167-041-P1-K1-E6
caacaactataataacttttttctctctccgaacagatcacactatggccactttaagcgccaaatcagtccatgattttcaccgttaaagatgccaagggaaatgatattaatcttggtgactacaaaggaaaggtccttatcattgtcaatgttgcctcacaatgtggcttgactaattcaaattacactgagctcagtcagttgtatgagaaatacaaacagaaaggtctggaaattctggcatttccatgcaatcagtttggggcacatgagcctggatctaatgaacagatacaagagtttgtttgtactcgcttcaaggctgagttttccgtttttgacaaggttgatgtgaattgtgacaa

SEQ ID NO: 53273 - DNA, 358 bp, Glycine max
  unsure at all n locations
  Clone ID: LIB3167-041-P1-K1-E7
cggggcgggccaggcgtacacgatggaccttttttcnccaccatagttattatttttaatagtattgacattattgatcgcttttttttaatgaaggctgtggatatcaatacttcanantattctattgttaggctcacgaggtagattgtgcccttcatgattgtcaccggcatggatgttgcataaattgatggctccccaagtatttgtccttactttttttgctatgatgatattatgtcacaattcttattcattttcatttaatgcgttttttatgaacaattcaatttatttaacttatatatttttaattgaagaacctcagcttatttttttttttgcttacacttat

SEQ ID NO: 53274 - DNA, 398 bp, Glycine max
  Clone ID: LIB3167-041-P1-K1-E8
ggcggccaggcgtccgcagctgttaccactgtcaaccgtgccggagctcttttggttgctccattcactggcctgaagtccatggtttactgggcgaccagaaagaccaacaatgacattacctccattgctagcaacggttgaagagtgcaatgcatgcatgtgtggccaccagttggcaagaagaagtttgagactctttcctacctgccagaccttgatgatgcacaattggcaaaggaagtagaataccttctcaggaagggatggattccttgcttggaattcgagttggagcaacggttcttgtaccttgagcacaacaggtcaccagtatactaccatggacgctactggaccatgtggaagctgcctatgtttggttgcacctgagcttc

SEQ ID NO: 53275 - DNA, 450 bp, Glycine max
  unsure at all n locations
  Clone ID: LIB3167-041-P1-K1-E9
ccgttacagaagaagagagcanaagcttcttcttttttataccttgacagacaaatcaggnagtnggaactattttcatttggtgtttggtagatatgcctattaggagcttggtagaggtggagccaccaagcccactgagatacttgatcggtgccgccgttatgatgatcggagtagtgttacccgtcggttacatgatgttccgtaacaagcgcgtcccctactcttcctcctactccaaacagacgaacaaggttttgatttgatataaaaaattagagatgtgctgaagccctatgatgattgtggcgggtattatgttagaagtctattgttttatggattttgatttgattacttagaggcttcagcagatattccatttgtttaattgtaaatgcattttgacttcccaaatacttttagtgctttctcactttattctgt

SEQ ID NO: 53276 - DNA, 419 bp, Glycine max
  Clone ID: LIB3167-041-P1-K1-F1
cccacgcgtccggattttttccctcaggcgtgtagttttcgtgccgatttgtaaattctttgcggagtttatgttagaatttttttttgttaagtttttagggttttgaatcggtgagatgaatcacaacaacaacaatagagcgaggtaccctcccgggatggggcttgggcgcggtggtttcaatccgaacccgagccagaacccgaacttgaaccagaacccgagcctgaaccagaatcatcacgcgttccaggctcggccaccgtaccaccaccagctaccttacctacatctcccttcttttctctgtctaatgtctgtccttgtccattgaattttaagcatttttctgttgtgtgctagctctgttcttactattgtttcatgttaaagtgttaagtgatacaattgctttc

SEQ ID NO: 53277 - DNA, 434 bp, Glycine max
  unsure at all n locations
  Clone ID: LIB3167-041-P1-K1-F10
cgcaaaacagcangagagaagagaaggtgtagacaaacacaatctctaatggcactcaggatgtgggcttcttccactgccaatgcactcaaagtctcttctacctccagacctcatctcttgcatcctttttctttctccagatgcttgtcttccgtcttggatggacttaagtatgcagattcacacgaatgggtcaagcacgaaggctcagtcgccaccattggtatcactgaccatgcccaggaccatcttggagaggttgtgtatgtggagctgccagaatcaggtggcacagttacccagaagtctggcttcggagccgttgaaagtgttaaagcaacaagtgacataaactctccaatcttcggggagattgttgaggttaacaaaaagctcacagagacaccctgcctgttcaactcaagcccata

SEQ ID NO: 53278 - DNA, 459 bp, Glycine max
  Clone ID: LIB3167-041-P1-K1-F11
gctgtttctatgtcattgatgattggtcgcgaatttgatgctggttgcaagagtatgctggggttaggactgtgattgttttaccagtgtgctgattagacagacaattagttgacttggttttttcctgaatgatctgatcattgtttcctgaaaaggattcttgatgctgtgatgaacacgagttgagcatattttgtcatgtagctgatgcctcgtaggagttggacctgtcatttgtagagttggacctgtggggtactaaatatgaactttaatgtgctggtgtttatttctagtcacagtggtaacaccttcatggtttatttttagggtattttaatcaataatttttaacattgatctttcaagattataacatctgctacttaatgtagtgagatacaattgttgtagcacactgctccatgacactgtagctgtgaggtggtagctgat

SEQ ID NO: 53279 - DNA, 466 bp, Glycine max
  Clone ID: LIB3167-041-P1-K1-F12
cttcgctttagcaaattccaattcccaatccaaaaccctaatttcgttcaaagaaccaatggggatggcaccaaaggcagagaagaagccagcggagaagaagcccgcggaggagaagaagtcgacggtgggagacaaggctccggcggagaagaagccgaaggccggaaagaagcttcctaaggagggaggagccggcggagaaggggggaagaagaagaagaggaacaagaagagcgtggagacatacaagatatacatattcaaggtgctgaagcaggtccaccctgacattggtatctcaagcaaggccatgggaatcatgaacagcttcatcaacgacatcttcgagaagcttgctcaggaatcttccagacttgcccgctacaacaagaagcccaccatcacttcaagggaaatccagaccgcggtcaggcttgtgcttgcccgtgaattggccagcacg

SEQ ID NO: 53280 - DNA, 382 bp, Glycine max
  Clone ID: LIB3167-041-P1-K1-F2
ctcagagccaccgtttcaaggggccatgtttgagtgacaccaactgtggctctgtttgccgaaccgaacgtttcactggaggacactgccgtggcttccgtcgcagatgcttctgcaccaaacattgttaattttaaaaaattaattaagagtgctttgatagaagatgatagatctatcatctttctactcgtgttgttaattaaccactttgtgtttgagaataagggttacccattctactatgggtttctttgtttgcctcttattttatctagttagagatccttttatgaaacgagtgatcagtgtgaaggaattatgttatctgtgttgttaatttaatattattctagtaaattttattccgtcgtgacttttt

SEQ ID NO: 53281 - DNA, 451 bp, Glycine max
  unsure at all n locations
  Clone ID: LIB3167-041-P1-K1-F3
ggtttattatgatggncggtgaaggtgngaattctaacacatggctactataatattaataataggggagagacaacaacgttggtgttggtggtgttagaagaatcccaccaacgcaaactttaattgaagaagatgaacagtcatatcccacctcggattttctcagctcgtgtcacttgtgccgaaagaatctcgatggcaaagacatatacatgtacagaggagagaaagcattttgtagcaacgagtgccgttcaaggcaaatatcgatggacgatgaacgcaaagaacggtgtagatcagaagcttcaaggtctgtggagttgtcaagttcaccatacacagcaagggatcaaatgttttcaactgggattgttgccctttagcgtttaatttctgtcactgtagtagagactcatatatactttgaagtttgaattcacaatat

SEQ ID NO: 53282 - DNA, 456 bp, Glycine max
  unsure at all n locations
  Clone ID: LIB3167-041-P1-K1-F4
cacgagtgacgagagagggtgtctccggaaaaaacaagtgaggttctatggctgctgtgaaaggagagaacgtgtgtgcctcgccatcgctnaaaatctccaaggaagtggaccccagacatgcttctgagaccttgcacttcgttgacgttatgggagctgccacgcccctttcccggtaactgcaacgcgcgtggcttctacgacgccttctaccggagcttcatcaaagtcgataacatccaacgtggacggatttcatgcaccgttgtggccaaaccacccatctgtaatggctatggaactctgcatggaggttctgttggatccttggttgagattctatctaatgcttgtgctagaactgtagttgctgaggacaaggaactttttctaggggaaatcagcatttcttacctttttgccactcccagcaatgaagaatgctagctaatg

SEQ ID NO: 53283 - DNA, 381 bp, Glycine max
  unsure at all n locations
  Clone ID: LIB3167-041-P1-K1-F5
aaatagttcaacacctncangcaatagataccttctttccatccacaatgagcatcagtcctgcaccttgcaaccgagcctggtcaataaaaaaagactccctaagaaggtatgtgcagtttgcgagtgaaagctgcgtacaagagttataggcagcttcggacacaaacaaaggaaatggcaatgatggatggaagatgctcactcttgacaatggagtggagatatcaaaacgcaggtcaggctcactccacacgtttcgcagccgtagggatcttagagctttctcttcccaacagttcataacagtggccaatgccattgatgcttcatagcaatgggactctgatctggtggaagccacgtaccaaaaagatcttc

SEQ ID NO: 53284 - DNA, 408 bp, Glycine max
  unsure at all n locations
  Clone ID: LIB3167-041-P1-K1-F6
cgtccgaaaaactgattcctccaccacacanaacaaaccattttatttcactttgntctttccattctcacgcactatcaattacatccctgcagaattcaccaacacttcaccnaactattctccacaactctttccctcaaaagcatgccactctttcatctcgaatagatgccatttccttcattgtcaaagcttcccaagaaccctctgcttctttagcttctcaagatatacaaataacgctccaattgattgcctttggaaccactcccccattagtttttctgttcaaccaacactcgaactcttttgctgcagaaaataataaatgattttttccttttttggacaataaagatggatattcatttctctaccctttccgctttcacgaattattattta

SEQ ID NO: 53285 - DNA, 364 bp, Glycine max
  unsure at all n locations
  Clone ID: LIB3167-041-P1-K1-F7
ggaancccggggcggcccacgcgtccgcccacgcgtccgcccacgcgtccgacaaactagacttcttcaaacaaaaatctgaaattggaggtcaaacacaaaaaaaacaaaaatgaaacctacgatcaccattttgttctctctactacttttcatagcttcaccctccttggcaacccgacccgcatccaaccctgatcaagtcatgcactccaaggacaacaaaaacaacaacaaccaaggtgatggtggtgggttctttggccccggaggaaggttcagcatacccggttttggaaacgggtttggaaatggcatcataggaggaggatacggatccgggtatggaggtccgaatggtggc

SEQ ID NO: 53286 - DNA, 151 bp, Glycine max
  Clone ID: LIB3167-041-P1-K1-F9
aaagtcttaaagattagaataagatcagtgatggatagaaagttcatttcagtagttggtttgggagtatgtttggtgctggtggtttaggaggtggctatggaggaggagctggtggtgatagtggtttaggtggtggatatggtggtgg

SEQ ID NO: 53287 - DNA, 282 bp, Glycine max
  Clone ID: LIB3167-041-P1-K1-G1
agggcatctgctcaagtacccggtagaagtcgatcgaaagggtaaggtaagatccctcccgggccacgaagagtttccggatgtgggaggaaagattgtaggatcattcattgccattcaggagaatctaaccatttgattacttttttacattcacgttgctggccattaggataggaataggatgaatgtaaatcactggtgtgcatgtaacttaattaaatgataacttttttttgggccaatcatcattcatataaataatcacacacgttaacattt

SEQ ID NO: 53288 - DNA, 459 bp, Glycine max
  Clone ID: LIB3167-041-P1-K1-G10
cccacgcgtccgacaaatcaaagccatggccaccttcaacttctctattgttctctccgtctcgctagccttctttttggtgctacttaccaaggcacactcgaccgataccgtttctttcaccttcaacaagttcaacccagtccaaccaaacattatgctccaaaaagatgctagtatttcatcctctggggtgttacaactcaccaaagttggcagcaacggcgtgcccacctcgggatctctcggtcgtgccctttacgctgccccaatccagatttgggacagcgaaaccggcaaggtagccagctgggctacatcctttaaattcaacattttcgcacccaacaaatcaaactcagctgacgggcttgccttcttcttggcacccgtcgggtctcagccccaatccgacgatggatttcttggtcttttcaacagtcccttaaaagacaagtc

SEQ ID NO: 53289 - DNA, 282 bp, Glycine max
  Clone ID: LIB3167-041-P1-K1-G11
gggccactcaccaacacacactctaccgaaaccatttcttacaccttcaacaagttcaacccaaaccaaccaaacattatgctccaaaaagaacctaacattacatccacaggggtgaaacaactcaccaaagtaggcaacaacaccatgcccacctcaatatctcacaatcgtgccctatacactgtcccaaaccaaatttgagacaacgaaaccctcaaagtagccaagctagctacattctataaatacaacaatttcacacccaacaaaaaaaactca

SEQ ID NO: 53290 - DNA, 77 bp, Glycine max
  Clone ID: LIB3167-041-P1-K1-G2
cccacgcgtccgcccacgcgtccggttttagccacatatcagatccaacagtgaaatcaaagagattggttctggcc

SEQ ID NO: 53291 - DNA, 457 bp, Glycine max
  Clone ID: LIB3167-041-P1-K1-G3
cccacgcgtccggggaaggatggcagtggcagagattctaaaccttggaggcccgccaagctgaagggggaggaaactgccgccatgccgttcgaattcccaaaactggacttgtttgcagcacaagctcaagtgcaacggcagattcctttgccttttctccgacaacagaaaggaggaacaagccagaaaagcattagaaggtgcactaagtgggaagaaaaatgaatttgacaaatgggacaaggaaattaaaagaagagaagagctgggaggtggaggtgacactggtggaaggggttggtttgggtggggtagatgtgttggctggtctaatgatgataatttttggcaagaagcaaaacaagctattcttactatacttgggcttgttgtagtatatcttctaattgcaaaaggcgatatgctccttgctggcatcttcaatccattgcta

SEQ ID NO: 53292 - DNA, 406 bp, Glycine max
  unsure at all n locations
  Clone ID: LIB3167-041-P1-K1-G4
agacgttccagcaaaaagtccaagcttggtttcactgtttatccttcaccccaagtttcaaccggtggtgttgagccttacaacagtgtcctctccactcattcccttcttgagcacactgatgtggctgtcctgctcgacaacgaagccatttatgacatctgcagacgttcacttgacattgagaggccaacctacaccaaccttaatcgtttagtttctcaggtgatttcctcactgaccgcttccctgaggtttgatggtgccttgaacgttgatgttaatgaattccagaccaaccttgtgccataccccaggattcacttcatgctttcatcttatgctcccgngatttcagctgagaaggctcaccatgagcagttatcagttggtgaaatcacaaaca

SEQ ID NO: 53293 - DNA, 459 bp, Glycine max
  unsure at all n locations
  Clone ID: LIB3167-041-P1-K1-G5
gaaaaaaaaaaaaaaaaaaaatcccnattcgctctttttttggaaagtgaaaaccagaagtgggggtaatgataaagcgattgagaagtgagagaagatggggttgtcgttcacgaagctgttcagcaggttgtttgcgaagaaggaaatgaggattctgatggtaggtctcgatgctgctggtaagacaaccatcttgtacaagctcaagcttggagaaatcgtcaccactatccccaccatcggatttaatgttgagactgtggagtacaagaacatcagcttcactgtgtgggatgttggtggtcaggacaagatccgtccactgtggaggcattatttccagaacactcagggtctcatttttgtggttgatagcaatgatagagatcgagtggttgaggcaagggatgagctgcacagaatgttgaatgaggatgaacttaaagattctgtttt

SEQ ID NO: 53294 - DNA, 181 bp, Glycine max
  Clone ID: LIB3167-041-P1-K1-G6
cgtgcgcccacgcgtccgcttggggcaagaaccccaacacttataatcttcttgagcagggaagtagttcggtggtttataaagtgtgagctggttggcctaaatagatgtatcgtgtgggtacatttcacataagcattttattatgactttatatatcatactgtttgatttggttcgc

SEQ ID NO: 53295 - DNA, 289 bp, Glycine max
  Clone ID: LIB3167-041-P1-K1-G7
ttcaacttgctccctcagaagcgaagaagattccttatgagaaccagtctcctactctctctcgcccacattaaaaatggcgtctcacatcgttggatacccccgcatgggtcccaagagagagctcaagttcgctctcgagtctttctgggatggcaagagcagcgccgaggatttgcagaaggtggctgctgatctcaggtcattcatttggaagctgatggctggtgctgggatcaagtacattctcagctacactttttcgtactattaccagctgcttgactcc

SEQ ID NO: 53296 - DNA, 413 bp, Glycine max
  Clone ID: LIB3167-041-P1-K1-G8
ctttgacactctgacgaaccctgtgagaacacttttaggggctaaacctggaaagggggcggaatgttataagttacggagggagtgtgaacatctcgacgggtgaggttaacaccaccatcactggcattatatataccgataagcatcttgctatatataaggtgggtaaggtgcttcttcctatggacttctttgctgttgctaaggcacctgcaaaagcaccctctttggctccagaaccttcaagtgatgcggcaaaggcacctaaagctgataaggatgagtcatcatcttcagatgcatcgcaggttaatcccactgaacagaactcttgcatcgagaagatcagtgtgtacggaatgtgggtgtcccttgtttttggactgggtcttctgattgcattttcatag

SEQ ID NO: 53297 - DNA, 376 bp, Glycine max
  Clone ID: LIB3167-041-P1-K1-G9
ccatttctgctgggaatgatgagttgattgggcaaatgattgcggaagcaattgataaggggggacctgatggtgttttgtccattgagtcttcgtcttcatttgagaccacagttgaagtggaagaaggaatggagattgacagagggtatatctcgcctcaatttgtgacaaaccctgagaagttgattgttgaatttgagaatgcgagagtgttgatcacggatcagaagatttcagcaataaaagatattataccactgttggagaaaaccactcagttgagagctcctttgcttatcattgctgaggatgtcactggtgaggctttggccacccttgttgtgaataagctacgtggtatccttaacgttgc

SEQ ID NO: 53298 - DNA, 423 bp, Glycine max
  unsure at all n locations
  Clone ID: LIB3167-041-P1-K1-H1
cccacgcgtccgcccacgcgtccgatgaatctgagattcctgaacaccctcttgaccctctaaccatccaagagttcaacaaggtccgcaccatcctatccaaccaccccctcttcaagtcctcatccacctacactctcaactcagttgtccttgaagagccagacaaaaagctagtcctcaaatggaaaaagggtgatccacccttgcctaggaaggcttccgtggttgcatatgtgaaaggagactctcatgtgctcacttgtggacctcgaaaccggccaggtggcgagccacaaaacccaccggctcagtctcggggtaccccaccatgaccatggaagacatggtggnggtactagaggttcccctcaggagcactgagttcaaccgctcgatcactaaacgcggtgtcaatttagc

SEQ ID NO: 53299 - DNA, 466 bp, Glycine max
  unsure at all n locations
  Clone ID: LIB3167-041-P1-K1-H10
cccacgcgtccgggtgcctctcttccatctccccagccaaaacctctctcaggaaggccgcgagtgacgcccttccgtcttcgcaacccttaacactccttcttctccttcctcttcatcttccttcccctctcattcaagacaggcctgtttttgctgcccctgcccccatcatcaccccaactgtgagagaggatatggcaaaggaatacgagaaagctattgaagaacttcagaaattgttgagggagaagagtgaactcaaagcgacagctgctgaaaaagtggagcagataacagcttctctagggacatcatcatctgatggcatcccatcatcagaagcctcagacaggatcaaagctggtttcattcacttcaagaaggagaaatacgacaagaatccagctttgtatggtgaacttgccaaaggccagagcctcaagttcatggtgttngcttgctc

SEQ ID NO: 53300 - DNA, 449 bp, Glycine max
  Clone ID: LIB3167-041-P1-K1-H2
gttttgtgattgcaggctttttttggcatatttgatgggcacggtggtgcaaaagctgctggaggtgctgcaaataacttgcaaaagaatgtgttagatgaagttattgtgagagatgaagatgatgttgaggaggcagtgaagcgtgggtacctgaacaccgattcggatttcctaaaggaggatctccatggtggctcttgctgtgtgacagcattgattaggaatggtaacctcgttgtgtccaacgcgggtgattgccgtgctgtcattagcagagggggtgttgctgaggccctaacatctgatcacaggccttcaagggaagatgaaagggacagaattgagagcctggtaagcttctgagtgtgatagtactttatcttttctgtctggtcattgaaaccacatcaacatgtttgaattggatttgttgggtattaaaagca

SEQ ID NO: 53301 - DNA, 220 bp, Glycine max
  Clone ID: LIB3167-041-P1-K1-H3
cgggacgaccaacgcctacatccacgcgtccagaagaaaactgtcttaccactccttctcataaacatcccacatatcactcgcgtttttatttcaaatgcggaactacacatatctacttaaataaattccaaccattttttttgctatcacaaccccatttatcttccacgcaactatattgcaaaagctattcttatttccctttctttgttattca

SEQ ID NO: 53302 - DNA, 391 bp, Glycine max
  unsure at all n locations
  Clone ID: LIB3167-041-P1-K1-H4
ccggacggaaggccggccgaccgagcgtccacgcgtccgttcctatactctattttttggcgtcacataaacaaaaaaaataaactggggagaagcatgttgttgatgttgggactatgctttctaatggtctctgcatttccacttgcgttctttgagagatgccacccacaagacaagaaagcgttgctccaactccagaaggacctcggcaacccttatcacatcatatcctggaacgcaaaggaggattgctgcgagtggttctgctgcgttaagtgtgacgagaaaacaaaccgcgtcattagcgttgccttatcatccncttttccagacaccaatctctcggcccaaatacctccctctgtgggtgacctcccttacctcgagt

SEQ ID NO: 53303 - DNA, 333 bp, Glycine max
  Clone ID: LIB3167-041-P1-K1-H5
cccacgcgtccgttaaaagcatctctttatggatggtaaaaagcttgttgctattatctctgaggcgggatcagctgacgtttctctgcagccagatagacgagctgcaaatcacaaaagaagggttcatttaacacttgaactgccatggagtgctgaccgttcaatccagcagttcgcaagaactcatcgatcaaatcaagcttcagccccagaatacaggatactatttacaaatcttgttggagaacgaagatttgcatccattgttgccaagagattagaatctataagtgctttgactcagggtgaccgcatggctctacctttctt

SEQ ID NO: 53304 - DNA, 450 bp, Glycine max
  Clone ID: LIB3167-041-P1-K1-H7
cccacgcgtccgagactactggtactaactaggtaggttgtacagattacattacacttggcggcatctggagaaacaaatggctaggtctgcgaaagggcatcaagatgaattcgacgacgatgatgaagaagaactcttaactgctaataacacctcttccaaagtgaaggtggatgaacccagcacggggaagagggtgaacccacagcgttcaaagcattcagaaaccgagcaacgtagaaggagcaagattaacgaaaggcaagctttaaagaaaagaagaagaaaaaattctttttgttgagttaattgtttgtgtgtaggtttcgagtggaagtttgatgtaattctatattatttggcaatatatgctcgtttgaaaaaattatgtttttgagccaggttttaggttctgagagatctaattcctcaaaatgatcaaaaaga

SEQ ID NO: 53305 - DNA, 322 bp, Glycine max
  Clone ID: LIB3167-041-P1-K1-H8
cccacgcgtccggaagaaaactgtcgtgaggacaaatgaagaagtatcactcatataatactcggtatcatttcatttcgataatcatccatagctactgaagaaaatggcaaccatctctgctgctatcacaaccccatcgatctcccgcgcaactcttgtgcaaaagcgggtctcatctcccgttcttggtttgccagcaatgggtaaggtgggaagagtgagttgctccattgaggaaaaaccttattctgtgaaagaaagcaactctagcatgttggggatgggggcatttcttatggcagctgccagcgcttcaaac

SEQ ID NO: 53306 - DNA, 345 bp, Glycine max
  Clone ID: LIB3167-041-P1-K1-H9
aatgaatctgatgcaggcggttcgctacgacgcctacgggggaggtcctgccggcctcaagcgcgttgaagttgccgttcccagtccaaaggcaaatgaggttttaatcaaactggaagcagttagcattaaccctattgattggaagattcagaagggtcttctccgtcctttatttctccccagaacctttccccacataccttgcactgatgtggctggagaaatagttgagatcggaactcaagtcaaagatttcaaagttggcgaccaagttcttgctaaactcactcatcaatatggaggtgggtttgccgagtttgctgtggctagtgagagcttaac

SEQ ID NO: 53307 - DNA, 261 bp, Glycine max
  Clone ID: LIB3167-042-P1-K1-A10
cccacacgtacactattattttatagtataatacattctgtcatatatctgtgtaggaatgggggtctttctttgcaaggaaaaatatggcgtgctattgggcaatgactggactgcaaccttatgaatatggccacaacttttgtatctcaaatgaaagtgacgatgacgatgatgataacacgccgcattgatgtgctcccggacggcatataagaatttcgcaaaacatgcctaaatgaggaggatgaggagggatat

SEQ ID NO: 53308 - DNA, 464 bp, Glycine max
  Clone ID: LIB3167-042-P1-K1-A11
cccacgcgtccgcttttacccctttcaatttcatgctcctctaaaacccacattctctgtctggcctcccctcccaaacccctctttctctgccgccactctctgctccgttaccgttccactccgcgactcacatgtaaggcagcccaagtttcggtcgccgaagagtcgtcggcgtccggcgacaactgggttccggtggtgcctctgtctgctctgccgaagggggagcggcgcgtgatcattcaggacggcgagaccatactgctgctttggtacaaagaccaagttttcgctattgagaataggtcccctgctgaaggcgcctatactgaaggcttgctcaatgccaagctcacccaggatgggtgcatagtttgcccatcaactgatagcacatttgatctgcgaacgggagatatcaaggaatggatccaaaaaatcctgttctgagagttctcacg

SEQ ID NO: 53309 - DNA, 288 bp, Glycine max
  Clone ID: LIB3167-042-P1-K1-A12
accgccggaacccggtcgcccacgcgtcgccacgtcgtcgtttacccttcaatcatgctcttaaaacccacattcttgcggcctccctcaaacccctttttgccgcactttgtcgtccgtccactccggctacatgtaggacccagttggcgcgaagcgcgggtcgcgacactggtccggggtccttgctgtctgcaagggacgggcggacatcagacggggccaactgtgttggacaaacagtttcgttgaaatggtcctgtgagcccttactgagctgtaagccag

SEQ ID NO: 53310 - DNA, 386 bp, Glycine max
  Clone ID: LIB3167-042-P1-K1-A2
acggccacgcgtccgcccactgcgtcctagtgttcacttgtcctgaccactggcgtatcagtaaactggtcccgctttgttaccaaccttcctgcatatcaccgcatacttgttttcgtgtgtgtaaaatcagtgcctgtccctcatgtccctgctgctgagaggtatctggtaggccgtgtaggacctgctgctcatcggtcctaccggtgtatagtcagatatggatatcgtgatgttcatcaagatgttgattcctttgagtctgaactagtagcaaggcttgctgatttcatccaatatgattggtaccgatctaggaggagtagcatgagcattgaggatgatggttcaaactgtacatgatgatggagagcttgaataac

SEQ ID NO: 53311 - DNA, 457 bp, Glycine max
  Clone ID: LIB3167-042-P1-K1-A3
gacgccacgcgtccggaatccgagaaagataattagtctattcataagaggagatgagatcatatgaaaaatataaccgattgggtgctttgtttgggctactggccatccgccggaagtttcgggtttaataccgatattttagcaacaaatctaataaatcttagtgtagtgttaggtgtattggttttttttggaaagggagcgttaagtgattgattcgatgatccataacagagaatctagagaactattggtaactcataagaattacgggaaggggccattgaacagctggaaaaagcccaagcccgcttaaggaaagtcgaaacggcagcagatcgttttcgggtgaatggctattctgagatcgagcgcgaaaaattgaatgtaactaattcaatttatacgactttggaacaattagaaaattacaaagacgacaccattcattttg

SEQ ID NO: 53312 - DNA, 400 bp, Glycine max
  unsure at all n locations
  Clone ID: LIB3167-042-P1-K1-A4
cgaacgcgtgggaagactaattgggttttgtggcttgctttgatctncactggaaatggcggcgtgggagcccaaggccaatgcacactatcctgggccttccacaccctagtctacacaacactatatacaaatgtatgcggcacatgctacttaataaccacctccggttcagcttctaccaccagatagcactctaacgacacaccgaatcaagtgttctgcgcctgtcttccatgcttcgttacttgcaccacccgcatctcctgcctctgcctgtgctgctgcagcgtttgcaccacccgcatattctgccgctgcctttcgtccttcggcatctactaaagcagacactccttcgtattgaatttgcatgtgccttttaaacaccaccagcaac

SEQ ID NO: 53313 - DNA, 419 bp, Glycine max
  Clone ID: LIB3167-042-P1-K1-A5
cccacgcgtccgtttttactgtttattgacaaagagaaacaatcggaggatctgttctgttcgataagatggctggacttttaggatataggagccttccacctaaggcaaagaatctggtagttgctgggggtttgacagcttttgtctttggtgcatacttctacaccatgagggctgttggaggcactgatgaactgcaggtagcaattgataagtttgaagctgacaagagcaagaatgagggtgatgccaacatgccatcaaaggtctaaagcttgtacaataaagcaatactttgggtgtattcactgttttggtttgggatcaagctttttacttagtatgagaatgttctaaaacgaatgatattgaatctagttgctaataagtttcaaccagctttatgtactatgact

SEQ ID NO: 53314 - DNA, 435 bp, Glycine max
  Clone ID: LIB3167-042-P1-K1-A6
gaccacgcgtccgatcctcgatgaggaaagtgcacaagtgagtttgttgatcgagataactagaaacagtgtgatgaaagggaaggtccttgttttcttcgttgctacaattttggtagcatggcaatgccatgcgtacgatatgttccctctccgaatgaacactggctatggtgcccgtactccggaggtgaaatgcgcaagttggaggcttgctgtggaagcacacaacatctttggctttgagaccattcctgaagagtgcgttgaagcaacaaaggaatacatccatggcgaacaatatagatcagactccaaaacagttaaccaacaagcttacttttatgccagagactctgaagtccatcccaaggacacatttgtgttcagtatagatggcaccgtactctctaatattccatactacaaaaaaca

SEQ ID NO: 53315 - DNA, 411 bp, Glycine max
  Clone ID: LIB3167-042-P1-K1-A7
acccacgcgtaacggccacgcgtaccgcccacgcgtcccggccatgcatctggttaaccaccaaccgaatccctaaccctaacgaagagatggcagggctcttgtcatcaatatttggggcggataaagaccaggtgaactgggcggtctacttcaagatcagagcgggcggggacggagaccgtggctgccggcttcacaccaagcgcacaagtccaccaacatttgttctggcgcacatgtaccaaaggcccaacatggacatgggcattattaccaaccgctatgagccacatccacaatcccttgacctgcgcaaggtgcaagatcactttggcgactattgcgaagatctctgccatgcgctcaataggtactgcccgagtgagagcttgaatatttgggacaacc

SEQ ID NO: 53316 - DNA, 235 bp, Glycine max
  Clone ID: LIB3167-042-P1-K1-A8
cccacgcgtccgcgaacagcatcttttccttctcagccatttacaggtctagttgaagctaggaatctaaagatggagatgtaaaccagatcgatcatccattataatttgttggtggattaggtcactcggagtgcctttgtcatgattttttcttttttcttttttcgagtacataacatatattggttgtatactgctccgtagaataaataagatcatattaatacctgtt

SEQ ID NO: 53317 - DNA, 313 bp, Glycine max
  unsure at all n locations
  Clone ID: LIB3167-042-P1-K1-A9
gattaaatgcttctcatttcagaaaggtgtttcgttgttcttgtgggaagttggaaacatcggttgggtatgactatgttgaggtccatgtatggggggactccttcatgttgcatcaaatacgcaaaatggttgggactgctgtggctgtaaagcgcaacttaatcccaagagatgccattttgttgtcactctccaagttttcgcggattgtcttcccccttgcccccccagaagttctgattttgaggggaaatgctttcaaaatgagagcaagtgctggaaactntacgcggcaagaaatggtgtctat

SEQ ID NO: 53318 - DNA, 396 bp, Glycine max
  Clone ID: LIB3167-042-P1-K1-B1
cttcctccaaacccacgaggcaacttccttcaacacaaggttccaaacctctgccataagacgcctcaggtacgacaactctgtggccatggttccattcggaccttactggaagttcgtgaggaagctcatcatgaacgaccttctcaacgccaccaccgtcaacaagctcaggcctttgaggacccaacagatccgcaagttccttagggttatggcccaaagcgcagaggcccagaagccccttgacgtcaccgaggagcttctcaaatggaccaacagcaccatctccatgatgatgctcggcgaggctgaggagatcagagacatcgctcgcgaggttcttaagatcttcggcgaatacagcctcactgacttcatctggcctttgaagta

SEQ ID NO: 53319 - DNA, 407 bp, Glycine max
  Clone ID: LIB3167-042-P1-K1-B10
cccacgcgtccgcttttacccctttcaattttattttcctctaaaacccacattctctggctgccgtcctctcccaaacccctctttctctgccaccactctctgctccgttaccgatccactccgcgactcacatgtaaggcagcccaagtttcggtcgccgaagagtcgtcggcgtccggcgacaactgggttccggtggtgcctatgtctgctctgcctaatgcggagcggcgcgtgatcattcacgacggcgagaccatactgctgctttggtacaaagaccaacgattcgctattgataataggtcccctgctgaaggcgcctatactgaatgcttgctcaatgccaagctcacccagtatgggttcattagtagcccattaactgattacacatttgatct

SEQ ID NO: 53320 - DNA, 375 bp, Glycine max
  Clone ID: LIB3167-042-P1-K1-B11
gaaattgagtttctgagataaccacttttttcttttattcatcaatggcaaccgcgaggaccgggaaggatgtttcgcctcacgatttcgtgaaggcttacgcctcccatctcaagcgttccggcaagatggagcttcctgagtggactgatattgtaaaaacagcaaaatttaaggaattggctccatatgatcctgactggtattatgttagggctgcctcaatggcaagaaagatttatttgagaggcggtcttggtgttggggctttccagaggatctatggtggaagcaagagaaatggaagccgtcccccacatttctgcaagagcaatggggctattgcaagacacattctgcaacaattgcaaaaca

SEQ ID NO: 53321 - DNA, 462 bp, Glycine max
  Clone ID: LIB3167-042-P1-K1-B12
cccacgcgtccgctcaaattaattaattttttttattatcaaaatggccctggctatggctgcgggcagtcttggacttcacttgagtgctgataacaccttgagaccttttgaaaaaaccaccgtcttgaaggccctctctatctcttatgttactaaaccatgttacatttctcacaaaacaagattatcatcaccttcatcttcaggaataacaatgatcgcacgagcaacagcagttactggtactgtggaggatggaaatcaaggagaggctgataccattccaactccggtagttataattgatcaagactctgacccacatgcaactgtggtcgagataacctttggtgatcgccttggggctcttcttgacactatgaatgcgttaagaaacttggggctgaatgttgttaatgcaaatgtatttctggattcttctggcaaacacaacaagtt

SEQ ID NO: 53322 - DNA, 465 bp, Glycine max
  Clone ID: LIB3167-042-P1-K1-B2
gagctataagctagtttatcgtgaggagaatatgaagttgtttgttttctttgttgctgcaggagttgtggtagcatggccatgccatggcgcaggctaccaaaggttccctctccgaatgaaaactggctatggtgagcgttcttcggaggtaaaatgcgcaagttttaggcttgctgtggaagcacacaacatccgagcctttaaaaccattcctgaagagtgcgttgaaccaacaaaggactacattaatggcgaacaatttagatcagactctaaaacagttaaccaacaagctttcttttatgctagtgaacgcgaagtccatcacaacgacatatttatattcggcatagataacaccgtactctctaatatcccatactatgaaaaacatggatatggggttgaggaatttaatgaaaccttatatgatgaatgggttaacaagggcgacgcaccggc

SEQ ID NO: 53323 - DNA, 420 bp, Glycine max
  Clone ID: LIB3167-042-P1-K1-B3
cccacgcgtccggaagagaagggctacacaaacacaatctctaatggcactcaggatgtgggcttcttccactgccaatgcactcaaactctcttctgtctccagacctcatctcttgcctcctttttctttctccagatgcttatcttccgtcttggatggacttaagtacgctgattcacatgaatgggtcaagcacgaaggctcagtcgccaccattggtatcactgaccatgcccaggaccatcttggagaggttgtgtatgtggagctgccagaaccaggtggcacagtttccaagaagtctggcttcggagccgttgaaagtgttaaagcaacaagtgatataaactctccaatctcgggggagatcgttgaggttaacaaaaagctcacagaaacgcctggcctggtcaactc

SEQ ID NO: 53324 - DNA, 456 bp, Glycine max
  Clone ID: LIB3167-042-P1-K1-B4
cccacgcgtccgcccacgcgtccgaaactttttgtcaattcatttcttgttgttagactctgcttctgtctccaacttcacacacaaaaaaacatggcaaaggatagaacaattggtgtggctctagatttctccaaaagcagcaagaatgctctgaaatgggcatttgagaacttagccgataaaggtgacaccatttatgtcattcacatcaacccaaactctctagacgagtcccgcaacaagctatgggcaaaatctggttctcctcttattcctttggtagagttcagagagcctgagattatgaaaaagtatgatgttgaaattgatattgaggttcttgatatgcttgacactgcttcaagacaaaaagagatccacattgttacaaaaataatattgggggattgcaagagagaagctttttgatgctattgagatctgaagctggat

SEQ ID NO: 53325 - DNA, 470 bp, Glycine max
  Clone ID: LIB3167-042-P1-K1-B5
attctcctcatcttcctctttttttcaacaaaatgtttttcaattctagctagttctattacgtcgtgcgcgaccatgaacatggcgatcgcgcttctgttcatggttttcgcagtttcatcagctttagacatgtcaataatatcacacgacaacgctcatgcggatagggccacgaggcgcaccgacgaggaggtgatgtcaatgttcgaggagtggctggtgaaacacgacaaggtgtacaacgcgctcggtgagaaggagaagaggtttcaaatcttcaagcacaatctgcgcattatcgatgaacgaaactctctgaaccgaacctacaagttgggactcaacgtgttcgctgatctcaccaatgcggagtacagagccatgtacctgcgaaccttggacgagggtccgaggttgggcttggatacgccgccaagaaaccactacgtgccacgtgtgggagataa

SEQ ID NO: 53326 - DNA, 212 bp, Glycine max
  Clone ID: LIB3167-042-P1-K1-B6
cacacacgccttaaaaccacaattcaaaaaccatgtttgttaagactgaaatcgaaacggcggcggggttgaaaatgttatggcaaagtaacaaaccttgttattgggtgaactagggaacattactaacctttcttaggggattacaatgcacatatataacttgcatgaacatgaatccatactaaatgagcttcatgacttagagggac

SEQ ID NO: 53327 - DNA, 343 bp, Glycine max
  Clone ID: LIB3167-042-P1-K1-B7
cccacgcgtccgtttcttttagactttctcatggtaggtgtttcagcagctgtctccaaaactgctgctgctcccattgaacgtgttaagcttttgatccagaaccaggatgagatgatcaaaactggtaggctttctgagccctacaaaggtattggtgattgtttcaagagaacaatggcagatgagggtgctatttctctatggagaggaaacactgctaatgttatccgttatttccccacccaggctttgaactttgcatttaaggattacttcaagaggcttttcaactttaagaaggatagagatggctactggaaatggtttgttggcaacttgg

SEQ ID NO: 53328 - DNA, 340 bp, Glycine max
  Clone ID: LIB3167-042-P1-K1-B9
gaaaaaccgggccgacccacgcgaccgaccacacttactcttatacccatttaaatttcatgtttctataaaacccacattctctgtctgtcctattttaacaaaccactcttcccctaccaacactattataatacattacctaaatcacatcctcaactaatattttattcaacccaatacatatcactccctatactcttcaccatccatcaacaacttttattatcaacaccacctaaaactacttcttactaaattcttcccaatcgtaatcatttttaggaaattcaaccatatgctcaagaactacaaataccaaaattttactactaataat

SEQ ID NO: 53329 - DNA, 335 bp, Glycine max
  Clone ID: LIB3167-042-P1-K1-C1
gcgaaggagacaagctagttgagaaggaaaagaagctggatggcaaagtgagtgttttgaggaaggaaaatgaatcattgcagggtatgctcgccgaggctcgaaaggaatccaaggatttgaatgccaaggttgaagtttggtgcagcaattcaaacaaagcactggcattgttgaagactactgctgctgcacttgtgtatcaacacaaggaaaggggtggtgaggaagtggcgtccaatgggaatcatgtggaggaaattcagccatatgctcaggaacttgatgcaataaaaaaggcattcaaaaacaaggatgagatggtggatgacatg

SEQ ID NO: 53330 - DNA, 253 bp, Glycine max
  Clone ID: LIB3167-042-P1-K1-C10
cccacgcctccgccgccctctgacaccttttctttttcgactacaacctcaagccctgcttcgttctttttgccatgaagaagtcctaccacctcctcaagggcaggctccggttcgccgctgtcctcgtctccgcctatttggtcgcctgcggggttatctccggtgttttcagcgtggttgtggtgcacggtggggaggactatggggttttcaccagaatcgtggtgttagggttccttttatattcttt

SEQ ID NO: 53331 - DNA, 331 bp, Glycine max
  unsure at all n locations
  Clone ID: LIB3167-042-P1-K1-C2
cccacgcgtccgtttgttgagacatataagcgttgaagctctctttggcaacccctggacgtggatcaggaatggtcaaaggtgaaaaaaggggagaccatgatgtttgattattgtgttggacgtgattgacttattgaaaattgattttgggtgaagttaccctggagctgcttctgcgtcatgggagaatcaattcttagatttcaatgttggatttttccattgtccatcaaggtaatgcatgcgtgtgtttatttccactggctattttacggtgngcctattattttggtggtatttttatactcggatatttactgggatcttc

SEQ ID NO: 53332 - DNA, 445 bp, Glycine max
  unsure at all n locations
  Clone ID: LIB3167-042-P1-K1-C3
gnctcaagcaaccatggcaatggcaacccaagcctttctcttaaccccacccctctccggtcggaaagcgagcgaccgcgcctccgtgccatggaagcaaaactccagcctctccttctccagcccgaagcccctcaagttctccagaacaatcagagcagcagccgccgacgagaccacagaggcaccagcaaaagtagaggctgcaccggtcgggttcaccccaccagaacttgacccaaacaccccttccccgatcttcgggggcagcaccggcgggctcctgcgcaaggcacaggtggaggagttttatgtcattacgtgggactcacccaaagaacagatctttgaaatgcccactggcggcgccgctatcatgagggagggtcctaaccttctcaagttggccaggaagggacagtgcttggctcttgggactaggctc

SEQ ID NO: 53333 - DNA, 447 bp, Glycine max
  unsure at all n locations
  Clone ID: LIB3167-042-P1-K1-C4
ccgaaacagaagcaaacctaaagaaggctggcttttacacatgggagcagttaattctcaaggatccggatcttatcactccaaatgcactttcatacaaatcagcaatgagagagaatctgttgaggcagggatacagaattgttggaatcattggagaccaatggagcgatctgcttggagaccacagaggcgaaagcaggacctttaagcttcctaatcccatgtactacattgagtagtaccttcacctctctcaacaatctagctagagtttgctcctatctatatgtaataaggtatgctgatatgcactattcaaataggagcattagctatgtttgttaatgtcactttatgttatgtggggaagtcacctaagacactccacgtaccctacgttgntgtctcttaccggctttaataaatcttctgccctttgtccat

SEQ ID NO: 53334 - DNA, 434 bp, Glycine max
  Clone ID: LIB3167-042-P1-K1-C5
cccacgcgtccgcttttttccatttaccctctcctttttttcttttcacaagcacaccacaggggccggcaatatatccactggcacatttctctacattccacctgacattcctcaaacacactcatttgcctgaatttctactccgacatctgctataatttccagctttgagagaaagaatgactattttaacttgcattcacgcttaattcatcttaacatttgctgtgctgacggtaaaccactatacacacgagaaggtgtgcaaaatagtaaacaagcatctgactatgcctgaaactgatgtggtgactctggactcaaaattatcaactcttggtgctgattccctttacacggactagatcaagatggcactagaagcaacatttgctattgccattgaagaggacagtgcacacatcatctat

SEQ ID NO: 53335 - DNA, 409 bp, Glycine max
  Clone ID: LIB3167-042-P1-K1-C6
aaaaccctctaaaaaggggaaaaaaaaaaaaaaatttttttttcccaatacttgatggtgagggtttgggaagccttaacagggttttggctaatcctaaggaaatagactaaccacaaaaggcccaggccgtgaggtttccagttctgtcaaggcccattcaaaagtggcctggtttggtgaaaacccggcccgttcgggcgacgcccgaagaagatatcggagaaggtagagaaaagcataaacagccccgaggaggcgtgttcgggaggcggtttgacgcggatgcgcgcggcctggacgagtgaggactgaccgcgcgcagcacgcaggagagagaacagctaccgtcaaatactgagcatcaagctgtatgcgactatatatgtactgactacatcaatcatct

SEQ ID NO: 53336 - DNA, 431 bp, Glycine max
  Clone ID: LIB3167-042-P1-K1-C7
cccacgcgtccgatcagtggctacagcctgcatgcttcacggtgcaagcagccggcccgcagcgcgcccgcaaatcctctggcctttccggaaccgtccgcattcccggcgacaagtcgatctcccaccggtccttcatgttcggcggtctcgcgagcggtgaaacgcgcatcaccggccttctggaaggcgaggacgtcatcaatacgggcaaggccatgcaggccatgggcgccaggatccgtaaggaaggcgacacctggatcatcgatggcgtcggcaatggcggcctcctggcgcctgaggcgccgctcgatttcggcaatgccgccacgggctgccgcctgaccatgggcctcgtcggggtctacgatttcgacagcaccttcatcggcgacgcctcgctcacaaagcgcccgatgggccgcgtg

SEQ ID NO: 53337 - DNA, 402 bp, Glycine max
  Clone ID: LIB3167-042-P1-K1-C8
agcaaaagcaagaagaactagtctaagcagaaatggcctcttcagtgatggcatctgtggccgtcaaacctgcccctttcactgttgagaagtcctcagttagaggccttccctccctctcaaggaactcctcttcattcagagttgtggccagtggtggcaagaagatcaagactgacaagccttatggaattaatggtggcatggctttgagggaaggagttgatgcatctggcaggaaaggaaagggaaagggcgtttaccagtttgtagacaaatacggtgctaatgtcgatggttacagtcctatctacgacaccaaggactggtcttcaaccggtgatgtctacgctggcggtacgactggcttggctatctgggctgtgactctacttggtcttc

SEQ ID NO: 53338 - DNA, 470 bp, Glycine max
  Clone ID: LIB3167-042-P1-K1-C9
gaaaaacgggcgacccacgcgccgccacctccgcactgctttatattattttacctgaactgggctgggtttgtatgctgttttgcatcttaaggtgtcagagattgtggtcattggacacagtgcttgtggtggtattaaggggcttctgtctttcccatatgatggaacctactctactgattttattgaggagtgggtcaaaattggcttgcctgcaaaggcaaaggtgaagacacagcatggggatgccccttttgctgagttgtgctcacactgtgagaaggaatctgtgaatgtttcccttggaaacctgctaacttacccatttgttagagatggcttggtgaacaaaacattgtcactgaaaggaggatactatgactttgttaaaggatcttttgagctctggtgccttcaatttggccttgcattctctttttccgatgaacattaaccattatcaatga

SEQ ID NO: 53339 - DNA, 432 bp, Glycine max
  Clone ID: LIB3167-042-P1-K1-D1
ggaaaagctcgatatcacttccccatctatcttcaagtttttgaagacacgtgggtggatagggactgagaacacaagtgaactcaaagtggaacaacccaagcttgtttcacagctcaacaacaatggcttctatctcatgcatcacccaccaccccatcacttccaagctcaataatgccttctcttcaccccacgtctctgcctcaaacttggcctcacggtttctgggcaccagaaaaagagttgggttgcatagcctcacctctagaataattggaccctctaatggctccaaagccacatgctggttcaggttcggcaagaacggtgttgatgccaaaagtgctggcatctatggcagccagggccgtgatgactttgatagagatgacgtggaacagtacttcaactatatggggatgctcgctg

SEQ ID NO: 53340 - DNA, 208 bp, Glycine max
  unsure at all n locations
  Clone ID: LIB3167-042-P1-K1-D10
cccacgcacccatacaaaaactattacaatttatttctaanacacaacaacaaatgcgggtcgttaaatcccaaactttgactgcctccaaacttaactcacctacccctaatccctctataaatcactataactatacaaatacattatcaaatctgaagtcatcaacaacctctaatacttacaattatacactattcacaatttt

SEQ ID NO: 53341 - DNA, 456 bp, Glycine max
  Clone ID: LIB3167-042-P1-K1-D11
gaaaagccttcaatcatatagcattctaagaaatgaagagccctaccattttcattctctttgtactttctgccttctacacctcactcctaccttcagccaccgctcaagtcgtggttgacatggaaggtaatgatcttcaaaatggtgggaaatattatgtgttgccagtaatagagtcatcatatggtggaataagagtagccgcaactggaaaagaaagatgccctctcactgttgtacaatctgccgatccgtatgataaggggattgcaacaattatttcaaccccatatcgagttcctgttatccgcgaaggctttcctttgaacattacgttcggtaattttgcagttatactgccttgtgtcccccttcgttctgagtggaccgtcgttaatggccaaccagaaagacccgcagttaaaattggttcgcccccaaatgcagaaaatg

SEQ ID NO: 53342 - DNA, 460 bp, Glycine max
  unsure at all n locations
  Clone ID: LIB3167-042-P1-K1-D12
gtgattgangagactcgttcttattcgtttttattttctactttagatgtttgtgtgtggtgtttttctctcacctgaaaatgtcttgctgcggtggtaactgtggttgcggaagcgcctgcaagtgcggcaacggctgcggaggctgcaagatgtacccagacttgagctacaccgagtcaaccaccaccgagaccttggtcatgggagtggcaccagttaaggctcaattcgagagtgctgaaatgggtgttcccgctgagaacgatggctgcaaatgtggagctaactgcacctgcaacccctgcacttgcaagtgaggtgttggagagctaaagcttcaagcagagatggcccttagaaataatgataaaaactatatgtagtttcaaaacttcaaaattatgtagtatgtattatgttgcactctggtgttttgtgtctaaacaaacacccttag

SEQ ID NO: 53343 - DNA, 282 bp, Glycine max
  Clone ID: LIB3167-042-P1-K1-D2
cttattctctcattctctctctacttcttaaagacgcacgcttcgttctaaaaccctaatcgggtatgtgcaaagagagctttgtagcacgtgcttaaggtatgttttaaacattgcttgtttagttggttccttttgatgtcatggcggcattgtgatgcaaaatgtgtgtgagctcatactgagaaggagctcatctgctaagtgcatttgaagaggatgtatggaagggcatcatcaggtcttgataggtttaagaaggctcagagcttggaaccattc

SEQ ID NO: 53344 - DNA, 193 bp, Glycine max
  Clone ID: LIB3167-042-P1-K1-D3
cccacgcgtccgcggacgcgtgggatcagaatgtttgagtcattccagattgtcatgtgctaacatggggattagaagagagattaatatggtcacagcaaatttaacttccatgattgaaagtttggaagttgacattatccaaacactgctgccacggactctgccctgcctgtaggcgttttgaatatat

SEQ ID NO: 53345 - DNA, 285 bp, Glycine max
  Clone ID: LIB3167-042-P1-K1-D4
cccacgcgtccgcccacgcgtccgcccacgcgtccgctcagaatcattaatttcttccatctggaagggtgagcgattggacaaattcttgttcatgcctagcaaaagtcacagcctatcctcattgattggttggtacttctctctctctccatcttttgaataacttttttcttttataattacacactaactaaatagaaattattttaaatgtaaaattttaataattcacactctgtatacattcttctttgttgaattcaattttagatttgtttgatt

SEQ ID NO: 53346 - DNA, 468 bp, Glycine max
  unsure at all n locations
  Clone ID: LIB3167-042-P1-K1-D5
cccacgcgtccgcttgntgatgccaaggctccaagttcaatacaatccccacaatgtgtctccgctcgagctgttcactctccttggaagaccactgctttctgtcgcaggattgcaagcaatgttatggcaatggctaccaccagagaggcacccgcagcagaagttgccacgaccgagctctctgttgccgagacgccagagattgtgaagactattcaagaagcttgggacaaagttgaagacaaatatgcagtgagttcacttgccgtagccggtgtggttgcattggttggctcagctggcatgatctcagcaattgataggcttcctttaattcctggggttcttgaggtcgtaagcattggctacagtgggtggtttgcttacaagaacctatttttcaagcctgacagggaagcttttctacgaaaggtaaaggaaacatatagcgaaatacttggaagc

SEQ ID NO: 53347 - DNA, 462 bp, Glycine max
  unsure at all n locations
  Clone ID: LIB3167-042-P1-K1-D6
gaccacgcgtccgccggaagctggcccaaaagtccccgaagactttggttcagcatgaggaaaaccgtaaccaagcgggcctcctccggaagcccatggtacggcccaaaccgcgtcaagtacttgggcccattctctggcgagcccccgtcctacctcactggcgagttcccaggtgactacggctgggacactgctgggctttcggccgacccagaaaccttcgccagaaaccgtgagctcgaagtgatccactccaggtgggccatgctcggggccttgggctgcgtcttccccgaactattgtcccgcaacggggtcaagtttggagaagctgtgtggttcaaggccgggtcccagatcttcagcgagggtgggctggactacttgngcaacccaagccttgtccacgcccagagcatcctcgccatctgggccacccaagttatcctaatgggtgct

SEQ ID NO: 53348 - DNA, 458 bp, Glycine max
  unsure at all n locations
  Clone ID: LIB3167-042-P1-K1-D7
aaaagttctgccaaatcaagaggtgttttaagatctttgtgtgtgttttgcaacaatggctaagttctttgctgctatgatcttggcactctttgccatttccatacttcaaacagtggtaatggctgctaatgaacaaggaggccacttgtatgacaacaagagcaaatatggaagtggaagtgtcaagagttaccaatgcccatcacaatgctcgaggagatgtagccagacccaataccacaagccctgcatgtttttctgtcagaagtgctgcaggaaatgcctgtgtgtgcccccggggtattatggtaataaagctgtgtgcccttgctacaacaactggaagaccaaggaaggaggacccaagtgcccttgagcttcaacttgttcaacttcaattgtcgctttcctacatttntatttgcttccttcttgtgccaatttaatgcactagc

SEQ ID NO: 53349 - DNA, 460 bp, Glycine max
  Clone ID: LIB3167-042-P1-K1-D8
caaggaagcctttttagagaaatttaaatttgcattttctgagggctttgatccagacagagggctgataaaagctggcattgcaaatcagacaacaatgctcaagggagagacagaagacattgggaaactattggagaggactatgatgcacaaatatggtgtggagaacatcaatgagcacttcatgagcttcaatacaatttgtgatgctactcaggagagacaagatgctatgtataaattggtggaggaagatttggatctaatgttagtagttggtggatggaactccagcaatacttcacacctgcaagagatagcggaggaacgtggaatcccttcttattggattgacagtgagcaaagaattggtccaggaaacaaaatagcatacaagttgaaccatggagagctggtggagaaagaaaactggctgccagagggtccaataacaatt

SEQ ID NO: 53350 - DNA, 454 bp, Glycine max
  Clone ID: LIB3167-042-P1-K1-D9
cccacgcgtccgacttgtcaggtttctcagatggaagagggattggaagagaaaagacgtccgtgttaaggaattacaaaagcaatctaagaaactggaggatgcagtgatcaatgcaaagaaaaactcttcatatcgtcagatgcagttgatgaagctgcataaaggttttctgcaagtgaaagattgcacagaaaaactaaaaactagtgaaaaagaacttcaggctctaattgatacagcaatgtcagagattgactgtgatggattaaaggatggacaactaacaaatggaagtcttgatggtagattgtaatatatctttcggaggttcagattgtgtcattgatgcttaaaatgtgtttagcacagaataccctaatgttatattggagaagaaaaaaaggctggataattattctcttttattaattcgctccagtctctactaaat

SEQ ID NO: 53351 - DNA, 56 bp, Glycine max
  Clone ID: LIB3167-042-P1-K1-E1
cccacgcgtccgttaatctactagtaaaataaattttggattttctgaatactgtc

SEQ ID NO: 53352 - DNA, 334 bp, Glycine max
  Clone ID: LIB3167-042-P1-K1-E10
gccacctcgccgcctctggcacctgcctcgtcgctcgcctcgagcccgtctacgcctcgccgcatgaagaagtcctaccacctctaagggcaggctccggttcgcgtgcctcgctcgctatttggtcgcctgcggggttatctcgggttttcagcgggtggggcacggggggaggactatggggtttaccagatcgggggggggtcctggggctttgggatggaactggggggtgtgggcaagtgtgttactatgttgaagagttatatcatctgggtattgatagaacgcgattcattattatcttttttggttctctttggtgaattcgttt

SEQ ID NO: 53353 - DNA, 463 bp, Glycine max
  Clone ID: LIB3167-042-P1-K1-E11
cggacgcgtgggcggacgcgtgggcggacgcgtgggttaacaacagcacaaagcgggttactggctgttcaagctaccatctctctctctctttcttagtgcctccttgccagaagttaaaatggcccaagaaactttcctattcacatctgaatcagtgaacgaggggcaccctgacaagctctgtgaccagatctccgatgctgtgctcgatgcatgcttggagcaggaccctgacagcaaggttgcctgtgaaacctgcaccaagaccaacatggtgatggttttcggagagatcacaaccaaggccaacgtggactatgagaagattgtgcgtgacacatgcaggaacattggttttgtctctgatgatgttggtcttgatgctgacaactgcaaggtcctcgtcaacattgagcaacagagtcctgatattgctcaaggtgtgcacggccacctcaca

SEQ ID NO: 53354 - DNA, 459 bp, Glycine max
  Clone ID: LIB3167-042-P1-K1-E12
cccacgcgtccgcccacgcgtccggtttgttgtgagctataagctagtttatcgtgaggagaatatgaagttgtttgttttctttgttgctgcagtagttttggtagcatggccatgccatggcgcaggctaccaaaggttccctctccgaatgaaaactggctatggtgagcgttcttcggaggtaaaatgcgcaagttttaggcttgctgtggaagcacacaacatccgagcctttaaaaccattcctgaagagtgcgttgaaccaacaaaggactacattaatggcgaacaatttagatcagactctaaaacagttaaccaacaagctttcttttatgctagtgaacgcgaagtccatcacaacgacatatttatattcggcatagataacaccgtactctctaatatcccatactatgaaaaacatggatatgggggggaggatttaattgaacc

SEQ ID NO: 53355 - DNA, 133 bp, Glycine max
  Clone ID: LIB3167-042-P1-K1-E2
gccactgggaagaacataaaatcggtaaactgcttctttttttttaatagccacagaattatggtgctggatcaattaactcccctttatggaagaagaatgccactaatttttcaaaacaataccactataa

SEQ ID NO: 53356 - DNA, 462 bp, Glycine max
  Clone ID: LIB3167-042-P1-K1-E3
ggtttcccctcgtctccgggctcgtttcgttctcgaataatcgatctacgataatgactcgcggtagccagagggatcgtgatcgcgaaagggctcaggctagaactggtgctaaaggcaagcagaaagatgatggattgacccctgaacagcgcagggaaagagatgcaaaggcgctgcaggagaaggccgcaaagaaagcggcacagggtgcatgagggaataatgcagctggaagcaaaaaataggcaataattcaatgagtagtttgagtttgccgattgttgattgtggacatggaatttgtggaaattttatgttgcattattcatggagtatgatgtgtttattaatgtaacttgcgacggaagaacaaataagttgtgcttctttgaaagatgttgtcgctgggggcaagatcaataacttgtatctttgtttggaataatagtatttggaatt

SEQ ID NO: 53357 - DNA, 499 bp, Glycine max
  unsure at all n locations
  Clone ID: LIB3167-042-P1-K1-E4
ggaannanccgggtccgacccacgccggtccggtcgctgcttcattcctccataaacctccgagcctctacatccgaagaaccgaagccatgggngaagacacatggaggtgggagctgctcgcaagctcaagtctcaccgcaggaggcaaaggtgggctgataagtcatacaagaaatcccatcttgggaatgaatggaagaaaccttttgccggttcatcccatgccaagggaattgtccttgaaaagataggtattgaagctaagcagcccaactctgctattcgtaagtgtgccagagttcaacttatcaagaatgggaagaaaattgcagcttttgtccctaatgatggttgcttgaactacattgaagagaatgacgaagtcttgattgctggatttggacgaaagggtcatgctgtgggagatattcctggtgtcagatttaaggttgtgaaggtatctggtgtctctcttctggctcttttcaaggagaag

SEQ ID NO: 53358 - DNA, 426 bp, Glycine max
  Clone ID: LIB3167-042-P1-K1-E5
cacttttccaattatatgaaagtttctacggcagtttaatttgtggcattccaaggtcgggctgaggtgtctgcaaatagaaagaggaagaatcagtataggggaatccgtcaacgcccttggggaaaatgggcagctgagattcgggatccaagaaagggggttcgtgtctggcttggaaccttcaacactgctgaagaagctgcaagagcttatgatgctgaagcacggaggattcgtggcaagaaagccaaggtgaattttcctgaggcaccaggtacttcttttgtaaaacgttccaaggtaaatccacaggaaaatcttaagactgttcagcccaatctgggtcacaagttcagagctggcaacaatcacatggatttggtggaacagaaacccctagttagctcagtatgctaacattgc

SEQ ID NO: 53359 - DNA, 485 bp, Glycine max
  Clone ID: LIB3167-042-P1-K1-E6
ggggccgacccacccgtccgcccacgcttccgaccgaaccaaaacggtcaccttttgctttcaaaattcgccaaattgtttgatccgggggcatcctgggacaaggatcaattgggagacgtattgcattggattagacaagtgctcggccttgcgtgtggattcctttggggttccatacctttggttggaggcatatggtttatcctctttttagcgttatccactggaattatatatagttactatgcagtaatactaaaggttgatgaggaagagtttggcggtcatggagccctccttcaagaggggctatttgcttccataactcttttcctgctttcctggattttagtttacagtttagcacacttctgattggctgggcattgaagcttcaacacagttgaaagatttacttgattacatttgcctgaatcgcaatcatctgctttacttctatgtaaaatgttctgattttgcaa

SEQ ID NO: 53360 - DNA, 455 bp, Glycine max
  Clone ID: LIB3167-042-P1-K1-E7
ggtaaagcaaggtttagggggtagagtacgtcttattttgtctggagcagcacctttatctgcgacatgtggaaggttacttacgggtggtgacttgtgctcatgtcctacagggatatggtctgactgaaacctgtgcgggaacctttgtctcattaccaaatgaaatagaaatgcttggaacagtgggccctcctgtaccaaatgtggatgtttgcctggaatctgttcctgaaatgggatacgatgccctagcaagtacaccaagaggagaaatttgtgtaaagggaaaaaccttgtttgcagggtactacaaacgtgaagacctcactaaagaggttctgattgatgaatggttccatacaggggatattggagagtggcaacctaatggaagcatgaaaattattgatcggagaagaatatatttaagctttcacaaggagaatatgttg

SEQ ID NO: 53361 - DNA, 455 bp, Glycine max
  Clone ID: LIB3167-042-P1-K1-E8
gaatcattgtgtatcgtggtctgtactttggattgtatgattccgtgaaaccagttgtcctgaccggatcattgcaggatagcttttttgccagctttgccctcggatggctcatcaccaatggtgcaggtcttgcatcatacccaattgacactgttagaagaagaatgatgatgacctctggtgaagctgtcaagtacaagagttccttggacgcattcacacagatcctcaagaatgagggcgccaagtccttgttcaagggtgccggtgctaacatcctccgtgccgttgctggtgctggtgtgcttgctggttacgacaagttgcaagttcttgtgttcggcaagaaagatggttctggtggtgcttaatttcagtgctgagtcagtgttattattattgtttttagatggcgatgataaaaacccggtctgagttcaaagagtttttag

SEQ ID NO: 53362 - DNA, 462 bp, Glycine max
  Clone ID: LIB3167-042-P1-K1-E9
ctcattccttcgcgaagcagccatggccttatttgtacgtggagccgcatctctaacccgcgtgggtctctcctcttccaagacgccccttcaactcatccaccgccgtggcctcgccgatcaccatggccctcccaaagttgcctgctggaaagacccaatgagcccgtctaaatggaaggaagagcattttgtgattgtctctttaactggctgggggctactcatctatgggggattcaagttggccacaggaggcaagggcaagaaagaagaggttttggcaaaagcatcaactgaggcgtagataatatttacaattcaaagtgttcttggtaataatgcgagctcccagacttttccgagattttcagactcggtcttgtttcatggcaaacaaatcttttggctagttatccattaacatttgcgaacagtaatattgggagatgattttttttt

SEQ ID NO: 53363 - DNA, 313 bp, Glycine max
  Clone ID: LIB3167-042-P1-K1-F1
cccacgcgtccgttccaccgttggcgcgacaggattcgaatccacacccctctccagttgggctcggtccgagatcgccgccattttctccctcatcgcctccttcatctacctcctcggcttcttcggcatcgacttcgtccagtccttcatctcacgcgcctcccacgactcctgggacctagacgacgccgtaacagctccctcccccgcaattaccaaattgccctcacgggatacctcaattattttctccgaggacgacgaggagattgtgaactccgtcgtcgagggcgtcacgccctcctacgcg

SEQ ID NO: 53364 - DNA, 446 bp, Glycine max
  Clone ID: LIB3167-042-P1-K1-F10
cccacgcgtccgcccacgcgtccgatcagagacatcgctcgcgaggttcttaagatcttcggcgaatacagcctcactgacttcatctggcctttgaagtatctcaaggttggaaagtatgagaagaggattgatgacatcttgaacaagttcgaccctgtcgttgaaagggtcatcaagaagcgccgtgagatcgtcagaaggagaaagaacggagaagttgttgggggcgaggccagcggcgtcttcctcgacactttgcttgaattcgctgaggacgagaccatggagatcaaaattaccaaggagcaaatcaagggccttgttgtcgactttttctctgcagggacagattccacagcggtggcaacagagtgggcattggcagagctcatcaacaatcccaaggtgttgcaaaaggctcgtgaggaggtctacagtgttgt

SEQ ID NO: 53365 - DNA, 320 bp, Glycine max
  Clone ID: LIB3167-042-P1-K1-F11
ctcggaccgtgcggaccgtgcggaccgtgcggacctggtgttgatcggatgctagacagggatgaaaatgaagtccttgtttttgtgtcaatttggagatggcaatgccatgcgtcatatgtccttcaatgaacactgctatggccactcggaggaaagccaagtgaggctgtggaaccaccatttggttggaccattctagaggcttgacaacaaagatctcatgcgacaattgaaactcaacagtaccacagttctttatgcaagacctgatcatcaggcacttggtcattaatgacgactttatttcatctcaaaac

SEQ ID NO: 53366 - DNA, 461 bp, Glycine max
  Clone ID: LIB3167-042-P1-K1-F12
attccaaagctcgaaggtgaacagtgagtgagtgagttattcagaacccaggatttggcgaaggtgaagcgatgagcagtgataggaatattggggttgccttggacttttccaaaggaagcaaaatcgctctcaaatgggctattgacaatcttctccgcaacggtgacatactctacatcgtccacatcaagccttccggaggaagtgaattccgaaatcttctctggtccaccactggttcacctctgattccgttgtcggagtttcgtgagaaggaggtgatgcatcactatgaggtggatactgatgctgaggtgttggacttgcttgacaccgcttctagggagaaacaggtgactgtggtggcaaagctatactggggggatgcaagagagaaaattgtggaagctgttggggatttaaagcttgactctttggtcatgggtagcagaagattg

SEQ ID NO: 53367 - DNA, 429 bp, Glycine max
  Clone ID: LIB3167-042-P1-K1-F2
ctagttctagatcgagaccgtgaaagatacagagatcgtgacttggacagagatcaggatagggacagaatcaggagggataaggagcgggaaagagagagagagaggagttttgattatgacaagaggtctaagtacacagagagagaaagcagccgggattatgacaatggtagtaagcactatcgtaggagcaggagtcggagtagaagtcggagcctgcaagctggcactgctcagtatgaatcacgttctagtcctcagagagaggagagtaagagaacttctgcttcgagtaatctagctcaacttaaagacatgtatggtgatttaggggataataaaagagatgccaacatggaaagaattcctagaaaggatagtggaaggtggagaggtattagacttggcgggtctactttggaagta

SEQ ID NO: 53368 - DNA, 264 bp, Glycine max
  unsure at all n locations
  Clone ID: LIB3167-042-P1-K1-F3
ccacactccagttactactcttttcaatccggtttttgtttttttcctctcataataacgtgggtgggtaattggacctcagtgctgttactgttacctgtgcctataataatgaaactcatgtgctggtgttgagcttttgtggccnancaaaaaaaataaaaaaaaatatataataaaaattaatatataaataaatataaataataataattatattaataaataaatcattgtaaaatattaaaataaaaaataatatta

SEQ ID NO: 53369 - DNA, 454 bp, Glycine max
  Clone ID: LIB3167-042-P1-K1-F4
cctttgttcagtgatttgctgagggaagcagaatttttagttcgggtttgaacaccccggtgggatcacgattccgtgtcgactcaccgagtttgaacgggtcaagacccggatcgcgtccgggtcgggtcagcgcgggaggacccggagattggggtggcggctacattattaaggacccggagggtggtcaattgcgatgacacgacgataactagttatggtgaatgattaatggtttcggaatttttgtttgtttttaacttatattaggttgtagttattgtttttggtgggaattcctgggtaggtgttaggctttggctgtttgggtatatctgatggtacacctggtgtaaatggtggtttgaacataaaagtataattagggataccttatgtatagattaaattctgaaaatatcaattaaagaaatgttttttttttttgaat

SEQ ID NO: 53370 - DNA, 300 bp, Glycine max
  Clone ID: LIB3167-042-P1-K1-F5
cccacgcgtccgcccacgcgtccggctgaggagaccaaggctgcttcttagattgtgccatcggtaaagatctcctgtgttttaattttttcttcttcttgattttccattttaagtatttcaggtgtttggttctcctgtcatatactttaaacagttcaaatactctattaaatctgctttccttcatctaactaggtattcagtttttgactgcacctgtcatcctcaacaccgtttcagtttatcagcattaaaaaaaaaataaaattattaaaaaatattaattaaaaaataatt

SEQ ID NO: 53371 - DNA, 366 bp, Glycine max
  unsure at all n locations
  Clone ID: LIB3167-042-P1-K1-F6
cggaaanaccgaacaacccacccttccttttatttttaaaaaaaaaaaaatttaaaataaaatctaatttttcaaaaaaaaaaaaaccaactgtttctctgttaatttttaaaaacaccactccacaaacacaaaaaatactctatttaaataaccttatcttaattttttcccccttctattccattaaacatctcttatactcctttttcctttctctacctttatcttttctcttcctatactttctttaatcccttttctttttttttaacactttcctcttccaacacttttccacaccaatcttccaattctactttttcttttccctttcccttattttaacttatttttttctttccc

SEQ ID NO: 53372 - DNA, 383 bp, Glycine max
  unsure at all n locations
  Clone ID: LIB3167-042-P1-K1-F7
annntaaacagaaggtaggggggtgaatgagaggatcgatgctcgcaacaatcttgaaacctacgtatacaacatgaagaatcaggtcagtgacaaggacaagctcgcggacaagttggagtcagatgaaaaggagaaaattgagactgcagtgaaagaagcattggaatggctggatgacaaccagagtgtggagaaagaagattatgaagagaagctgaaggaggttgaagccgtttgcaacccaattatcaatgctgtgtatcagagatcaggaggagccccaagtggtgcatgtggcgaaggccaagaccaggatgatttttacgatgagcttttaattaatctaaattttatcatatatgggaaattaataatttccc

SEQ ID NO: 53373 - DNA, 421 bp, Glycine max
  Clone ID: LIB3167-042-P1-K1-F8
cttgggagaagaggtcgagtttcacagcatcaatgttgtacgtcaaggctcagaaatgaaaaggctacttcaagagatatcaagtcaagttcaagagaagaagagagggaaaaaccgattaccgtgccaggattcggttgattaatcaggacaagaacaaatataacactccgaaataccgatttgttgttcgctttagcaacaaggacattgttgcacaaataatatctgctagcattgctggcgatattgttcttgctgcagcatatgcacatgagctgccacgatatggtcttgaagtagggcttacaaattatgctgcagcttattgcactggtctcctgttggcccgaagagtcctcaaaacacttgaaatggatgaggagtatgaaggaaatgttgaggctactggagaggatta

SEQ ID NO: 53374 - DNA, 450 bp, Glycine max
  Clone ID: LIB3167-042-P1-K1-F9
cccacgcgtccggattgctagaatggaatttcgatgctcagtcatctcttttaccattctctggctctcttgctcttgcaggagagagccatgtccatgcatcgctacctgaggaagattattgggaagctgtttggccaaacactcccattcccactgcactgcgagagcttctaaagcctctccctgcaggtgttgaaatcgatgaactccctaagcaaattgatgatacacagtacccaaaaacattcttctataaagaagaccttcatccaggcaaaacaatgaaagtacaattcaccaagcgtccctatgcacaaccttatggtgtatatacatggttaacggatattaaagacacctctaaagaaagatatagttttgaagagatatgcatcaagaaagaagcgtttgaaggagaaaagaaagtttgtgcaaaatccttgggaa

SEQ ID NO: 53375 - DNA, 471 bp, Glycine max
  unsure at all n locations
  Clone ID: LIB3167-042-P1-K1-G2
gtgtgaataggccacgtcaccgttttgagtccggttgtgagtcagntgcgagttgagaccggggctgtgcattttcttgcgcagcccatacagactctgcgccctgtgctgcgtgtgtgtgtgtgcgagagagagagacaacgaccccagacgcttccactctttctttggcggcggcgtcgttttctctacgctttacccattcattcattcattctcaggttcggggcatttcattctgattcactatggccaatggtccagcaccgttttctgagattgggaaaagggcaaaagaccttttatacaaggattacaactttgatcacaagtttagcctctcaattccaaactccactggattggggcttatagcaacaggattgaagaaagataaactttttgttggtgacataagtacactctacaagagtggaaatactacaatggatgtgaaagttgatacatact

SEQ ID NO: 53376 - DNA, 479 bp, Glycine max
  unsure at all n locations
  Clone ID: LIB3167-042-P1-K1-G3
ccggncgaccacgcgtccggcaaaacgagttctacctcaagtctttaattctcgaagacattccaaaccatggaaccattgagttgatatgtaactcctgggtttacaattcaaaacactacaagactgatcgcattttctttgccaacaatacatatcttccaagcgagacaccggctccacttgtcaagtacagagaagaagaattgaagaatgtaagaggggatggaactggtgagcgcaaggaatgggataggatctatgattatgatgtctacaatgacttgggcgatccagataagggtgaaaagtatgcacgccccgttcttggaggttctgccttaccttaccctcgcagaggaagaaccggaagaggaaaaactagaaaagatcccaacagtgagaagcccagtgattttgtttaccttccgagagatgaagcatttggtcacttgaagtcatcagattttctagcttat

SEQ ID NO: 53377 - DNA, 459 bp, Glycine max
  Clone ID: LIB3167-042-P1-K1-G7
acgcgttaagctaagcaaagcttccttacctttctctttttctctctttctcttcccttccaagcgctgccataacgcgatcgaatgacaacctcgttggagacaccgccttctcctctcgacctccacaacaacagccaggaggggatgcgcgtgatgggttatttttcttctcctcttttcagcccttcctctgataaacgtttctggagcactctcaggagcaggatcgacgcgctcctcgatgctcgtcaatccgaaacctcaactcactctcctacgaatgaacaaggcaacaaccggttgaaggaagattctatgttgctgatgagagggtttgactcagttgcccacacactctctctgttgtccaataatttggacaatgcccttcatggtgctagggaattggcgaatccacccacattaactgacatattccacagcaaatattataag

SEQ ID NO: 53378 - DNA, 397 bp, Glycine max
  Clone ID: LIB3167-042-P1-K1-G8
cccacgcgtccgggcgccgcgggacggacatgccttgcgggcgccgcatgttcttctggtgcgcgtcagattccgaggggacagtttttgtcgccggcggacacgacaatgagaagaacgcgctgcggtctgcgctggcctacgatgtttcctcggaccggtgggttgtgcttcccgacatggcggcggagcgcgacgagtgcaagggcgttttcagcggcgggaggtttgtcgccgtcggcggttacccgacggagacgcagggaaggttcgtgaagagtgcggaggcgttcgatccggccacgaggagctggagtgaagtgaatgacttcttggattgcgccacgtgtccgagaaccttcgtggacggtggcgatgacgagggggtgttcttgtg

SEQ ID NO: 53379 - DNA, 447 bp, Glycine max
  Clone ID: LIB3167-042-P1-K1-G9
aaaagctccatgcttctgtgctcgcccttgtattccttcttgtcatactatttcaggagggagtggtaacatgtatgaagaatgaagacggatcagaagaatggggatatgtgcaagttagaccaaaagcccacttgttctggtggctttacagaagtccatacagagtggagaatccctccaagccttggccaatcattctctggcttcagggaggaccaggctcttcaggagttgggtttggaaattttggagaggttggtcctttggatgctaatttgaagccacgaaatttcacatggttgagaaaagcagatctcttgtttgtggacaacccagttggaaccgggtacagttacgtggaggattccaatctttatggcaaaacagacgaagaggcaaccacagacttgacaacatttgtagttgaattattcaacaatgatg

SEQ ID NO: 53380 - DNA, 261 bp, Glycine max
  unsure at all n locations
  Clone ID: LIB3167-042-P1-K1-H1
ctttaccaccaggcattgaaggggccggttttttgagagacaataacacaaaagcttgtggggctgcaggctctagttcgaactaggcatgtaaaaggaattgcttgaactctgaatttgttttgtccaaaaggtagaaatagaattgcccattggggatgtgaaattccatggatgtgatgcattgcctattggctggcgcagaccangcaagtgataatccattggcctgcagaagaagaccaacaattgtgatattgg

SEQ ID NO: 53381 - DNA, 404 bp, Glycine max
  Clone ID: LIB3167-042-P1-K1-H2
cccacgcgtccgggcgtacggcaaaccaagccatgttccaaaatattggaaacgaggatcaaggtgatgcttctaataatgaagccaggaactttctgggtcctgctgcacctcctccaagacctggtatgccttcagttcgtcctcttccaccaccacctggactggcattgaatcttccccgtgttcctgtccaatattctgctccccatagtggtgcccttccaatgcctccaccaagacccatgatgccatctattcggcctgctcctcctcctccaatgccgatgaatactggacagcagtcagttatggctggccaaccacccccaatgcatccatcaattcctatgaataaccaaagaattcccataccccccacctccgggatctcacttcactca

SEQ ID NO: 53382 - DNA, 359 bp, Glycine max
  unsure at all n locations
  Clone ID: LIB3167-042-P1-K1-H3
tcaggaaggtnnagtttgcaccaaagggttcaacggcttgannatttcctatactnnttgataagggtgtgaagtnncaattgggaagaatggcgagtgcgccacttgtacaatggtttttataagggagannagaaaagggggaattatttgtgcgatgtgtattcaagttggaacttcacaaaagttcttagtaaaaacaaagaagggaaggtttgtggacagatatgctacctactcacctcaccttcttgaaaatcgagaaaagacatcgaagaagctcttgcnaatcttgagtacttaagattttattctacatatctaatgtgctgaggacataagcaatctgtccggtgtct

SEQ ID NO: 53383 - DNA, 272 bp, Glycine max
  Clone ID: LIB3167-042-P1-K1-H7
gccgatcccgtcgacccactcgcaaaatattgccaccccaatttgctttatctatactaacacacaggtggggtagatttctcagctgaacatgcttcatatatgtcattgctcacaactgaagcttgcccacacgcaaagtgctggtggaagcaaagaaaaggctcttgatgatcctgaggtgcaaagagaccctgtgagacgccatctagaagggggggaagatgagcccacgccacgccgacagacttgggcggccaagaagaaggggt

SEQ ID NO: 53384 - DNA, 448 bp, Glycine max
  Clone ID: LIB3167-042-P1-K1-H8
cccacgcgtccggaacaaaaaagtgtagtgggaaatggcaggtgcgggtgcaggaggagggtatggggacgcgaaccagaggatagactacgtgttcaaggtggtgctgataggggactcggcggtggggaagtcgcagatactagctcggtttgcgaggaacgagttcagcttggactccaagtccaccatcggtgttgaatttcagacgaggactttggttatcgatcacaagaccgttaaggctcagatctgggacactgccggccaagaacgatacagagcagttacgagtgcatattacaggggtgctgtgggggcaatgttggtttatgacatcactaaacgccaaacctttgatcacataccacgttggttagaagaactgcgcaaccatgctgacaagaacataatcatcattcttacaggcaacaaatgtgatcttgag

SEQ ID NO: 53385 - DNA, 469 bp, Glycine max
  Clone ID: LIB3167-042-P1-K1-H9
cccacgcgtccgcacaaaccctcccctcacactctccaaaccctagcggcactacacacgttggctctctctctctctctctctctccctctctccttccccaagatgtcgagcgccgatcccgagcaccgagaagaggaggaggcacccgccgtcggcgacgacgaggacaccggagcacacgtcgctcccatcgtcaagctcgaggaggttgctgtcaccaccggcgaggaggacgaagatgcaatcctagatctcaaatcgaagctttaccggttcgacaaggatgggaaccaatggaaggagcgaggcgcgggcaccgtgaagttcctgaagcataaggctacgggcaaggttaggcttctcatgaggcaatccaagacgctcaagatctgcgccaatcatctcattttgcctactatgagtgtgcaagagcacgctgggaacgaagaaatctgcgtttggcacg

SEQ ID NO: 53386 - DNA, 361 bp, Glycine max
  Clone ID: LIB3167-047-P1-K1-A1
caaaaaggtgttccccaaaccaaggtagctaattggtttcatcatttgtgggcactttattacgcaacatgttcacacaaaacaaacacttatcatctgttcctgcaagtagaggtgctccaacaaggagaagagtacacttagcaacaacaagagcagagagcatgactactgtcatagaaaaacttggcatcaagattgagaggaaccctcctgagtccaagctcactcaactgggtgttaggcaatggcccaaatggggttgccctccaagcaagttcccatggacatatgaagccaaagagacttgctatcttctggaaggaaaagtgaaggtctttcctagtgggtcaaatgagtc

SEQ ID NO: 53387 - DNA, 372 bp, Glycine max
  unsure at all n locations
  Clone ID: LIB3167-047-P1-K1-A10
agggatcagacgggaatcttggaccgattgatagtattcttttacttgggtggcgccctggagctgttttaatgattcaagagtatgataactatctnggtcccgaaagtgttttggaagtgttatcagacacaccattagatgacaggattaataaggcaagcaacatcaatggtcataataaactcaagaatgtccgggtttctcatcggattggaaatcccatggactatgacaccttaaaggaaaccattttgaatattcagaattctttgaagaatgaggatgttcctatgtcaattgctgtcatatctgacagagactggcttcttggagatccagctaaggcagacaagctgtctgcttattctc

SEQ ID NO: 53388 - DNA, 297 bp, Glycine max
  unsure at all n locations
  Clone ID: LIB3167-047-P1-K1-A11
cccacgcgtccgcggacgcgtgggcnattagtagttttatnnngggnncnggnaggcgaagtgactgatttatgatacttgttgcctgcaaagacaatttcagttgaggccaagtttttagtactgaagacttaagcaatccgttgagttttttttttttattattgagtttagattacactttgttgagaaaagatgtaacttgtatgctcagttactttatcgagaaatagatgtcaatggtgacttcactttttgtataagagagaaaatttccatcttaaaaaaaaaaataaa

SEQ ID NO: 53389 - DNA, 429 bp, Glycine max
  Clone ID: LIB3167-047-P1-K1-A12
cccacgcgtccgactgattatacacctttctttgtcaagaccgagcaatgacatttcccagagagaatatgatctatagagaaaggcattgtcccgctgaaaaggagaaattgcgctgcctcattccagcccccgaagggtacacaactcctcttccgtggcctaaaagccgggattatgcctactatgctaatgctccttacaagagcctgacagtggagaaggctgttcaaaactgggtgcaattccagggaaatgtgtttaaatttccaggtggagggaccatgttccctcacggcgcagatgcatatattgatgaacttgcgtcagttattccaattgctgatggttctgtcagaacagcactggacacttgttgtggagttgcaagctcgggagcctacttgctaaagagaaatgatgctgcta

SEQ ID NO: 53390 - DNA, 427 bp, Glycine max
  unsure at all n locations
  Clone ID: LIB3167-047-P1-K1-A3
gagaaagaaagggaaacangaagaagnaagttcatanttattgcgnggggaacngaagggcaggtttcatgttgtgaagggaaggatcgccctctgggaagaaatatctcagaatttgttggctaatgggatcagcagaagtcctgggcagtgtaaatctctgtggacttctttgttacagaaatatgagcaggaggtgaagaatgaaaagaagaacaagaaaaaatggccgtattttgaggacatggaaaggattctagctgctaacaagacactagaaacaaaatgattataaaggtgatgcaccagacaagaaaaatttgcaagagttttctgcattatgattggtaatatgtctgagcatggtcgctgggaaggtaatccatcagttgcattattcttgcatcttgaactccttcattgaata

SEQ ID NO: 53391 - DNA, 361 bp, Glycine max
  unsure at all n locations
  Clone ID: LIB3167-047-P1-K1-A4
cccacgcgtccgcaattatggctctgaatctttttanctcacctaagtttaaatgggttcctggcgtagattgtgcttcctattgtttgagaccttcacttgggtcttgttttggtaacataaacattgctagtgtgagtctaagtactactagaagtttgagtttgaggaggagtgggagtgttagtgtaagatctagtttagaaactgcggggcccacagtcacagtgggacaggtcactgaggttaacaaggacaccttctggccgatcgttaaggctgccggggataaaaccgttgtccttgacatgtacacacaatggtgtggcccttgcaaagtgatggctccaaagtttcaaga

SEQ ID NO: 53392 - DNA, 427 bp, Glycine max
  unsure at all n locations
  Clone ID: LIB3167-047-P1-K1-A5
cccacgcgtccgttcttttataaaaaaaaataaatttcnttttttaaatattnaatgaaattaagtgtttattttaataaaattagtcgtgttttattcgattttttgaattggtttttttttacagtagctaatgctagtcaccgaacttagtcaatgagctagaatgggttataaagatatctatagatatatatagatatatttatctatagatatctttagaaaaaaaaaaagaaaataaacaaataagacgtatcattttatgtatagtagtggggaattatgggacaaaaaataaatccgcttggtttcagacttggtacaactcaaagtcatgattctatttggtttgctcaaccaacaaattattccgagaatatacaagaagataaaaaaatacgagattgtatcaaaaattatatac

SEQ ID NO: 53393 - DNA, 430 bp, Glycine max
  unsure at all n locations
  Clone ID: LIB3167-047-P1-K1-A6
cttcaagaaggagaaatatgacaagaatcctgctttgnatggtgaacttgccaaaggccagagccgcaagtttatggtgtttgcttgctcagactcaagggtgtgcccatctcatgtgctagatttccaaccaggagaggcctttgtggtcagaaatgttgctaacattgtcccaccatatgaccagtcaaaatacgctggaactggggcagcagttgagtatgctgttttgcatcttaaggtgtctgagattgtggtcattggacacagtgcttgtggtggtattaaggggcttctgtctttcccatatgatggaacctactctactgattttattgaggagtgggtcaaaattggcttgcctgcaaaggcaaaggtgaagacacaacatggggatgcaccttttgctgagttgtgctcacactgtgag

SEQ ID NO: 53394 - DNA, 408 bp, Glycine max
  unsure at all n locations
  Clone ID: LIB3167-047-P1-K1-A8
gcattagcaaaagcaagaagaactagtcnatgcagatattggcctcttcagngatggcatctgtggccctcaaacctgcccctttcactgttgagaagtcctcagttagaggccttccctccctctcaaggaactcctcttcattcagagttgtggccagtggtggcaagaagatcaggactgacaagccttatggaattaatggtggcatggctttgagggaaggagttgatgcatctggcaggaaaggaaagggaaagggcgtttaccagtttgtagacaaatacggtgctaatgtcgatggttacagtcctatctacgacaccaaggactggtctccaaccggtgatgtctacgctggcggtacgactggcttggctatctgggctgtgactctacttggtcttc

SEQ ID NO: 53395 - DNA, 458 bp, Glycine max
  unsure at all n locations
  Clone ID: LIB3167-047-P1-K1-A9
cgaaactacangaaaagaaatggncttccacnnnctgnnagtttcaatggctatgnccagtaaccttatgcgtagctcagaagagggntggtgcctacgctcggatgcattncttcaagnccactgcctctancggtcttccaaggcnagtgaccagcatcaaaactcaatgganaggtttcaaggtgagggcctccatgaagggagaaagttgtgacggggctcaccgcagctgcattgacagcttcaatgatggttcctgatgtggctgaggctgccgttacaccttctctcaagaacttcttgctcagcatcgcggcaggtggagttgttgttgttgccattattggtgctgtgatcggtgtttccaatttcgatcccgtcaagcgtagctgatggagttctgaggcactgtgttttatttatttttttggtacctcttatcatgatatgtatct

SEQ ID NO: 53396 - DNA, 461 bp, Glycine max
  unsure at all n locations
  Clone ID: LIB3167-047-P1-K1-B1
ggggccgcccaacccttccgcccacgcgtccggtagttgagaactaagaataagtaaatggcttcctcaagganctcctcccgagctgttaccaccgtcaaccgtgccggtgccggcatggttgctccattcaccggcctcaaatccatggctggcttccccacgaggaagaccaacaatgacattacctccattgctagcaacggtggaagagtacaatgcatgcaggtgtggccaccaattggcaagaagaagttcgagactctttcctacttgccagacctcgatgatgcccaattggcaaaggaagtcgaataccttctaaggaaaggatggattccttgcttggaattcgagttggagcacggtttcgtgtaccgtgagcacaacaggtcacctggatactatgatggacgctactggaccatgtggaagctgcctatgtttggctgcactgatgc

SEQ ID NO: 53397 - DNA, 437 bp, Glycine max
  Clone ID: LIB3167-047-P1-K1-B10
cagactcaagggtttaagccatgggaataagtaaggttttggcaaagcctcctccaaagaagcgaatggataagctcgataccgtcttcagctgccctttctgcaatcatggcagcagcgtcgaatgccgccttgacatgaagaacttgataggggaagctatttgcgggatatgccaagagagctttagcactaccatcacagctttatcagagccaatagacatatacagtgagtggattgatgaatgtgaactggtaaaccacccggacgatgatggtgctgagcactgatgctcagattcctgttcttgtttgtgaacggattaactggccaattttatatcttcaacctgtaactatgtcggttcctgatgtgagtgagcactggtgcaactataagatgcatgtaatagcttagttatgtaatagcatgtg

SEQ ID NO: 53398 - DNA, 362 bp, Glycine max
  unsure at all n locations
  Clone ID: LIB3167-047-P1-K1-B11
ttcttaactcaacttctgctacccactttcttcnttcatgtccaaccacgcttttctctacagtcattgtcaaggtcaagatcggaatcaacggatttggaagaattggccgtttggttgccagagtcgctctgcaaagagacgatgtggagctcgttgccgttaacgaccctttcattaccaccgattacatgacatacatgtttaaatacgacagtgttcacggacactggaagcatcacgatgtcaccgttaaggacgagaagacccttctcttcggtgacaagccagtcactgtttttggacacaggaaccctgaagagatcccatgggggtcaactggagctgatatcattgttgag

SEQ ID NO: 53399 - DNA, 324 bp, Glycine max
  Clone ID: LIB3167-047-P1-K1-B12
aaaaccatggcttcatattatatgtatatctagctcttcattttttcttgctcaagattatgctgtaaaattctgaaactcacagtatcagccacattttagacttaaagatctgcgcgttgacccttggcaggttcagctttaggagttgttcatcctcataagcctatgattagtccaagtttttcttttttttctctctctctctctctcaagttcaaagatttgattcctttttcccgtgtctttctctctcccttgctgtggacttgtggaaagctaaagtcagagatttctgagacatgttctagcaaacttttggtg

SEQ ID NO: 53400 - DNA, 422 bp, Glycine max
  Clone ID: LIB3167-047-P1-K1-B2
cggacgcgtgggtttgagtcttcttgatccccccttttcttcttgaactcaaacatggcagatgaggtggttctgctagatttctggccaagtccatttgggatgagggtcaggattgcacttgctgaaaagggtatcaaatatgagtacaaagaagaggacttgaggaacaagagtcctcttctcctccaaatgaacccggttcacaagaagattccggttctcatccacaatggcaaacccatttgtgaatccctcattgctgttcagtacattgaggaggtttggaatgacagaaatcccttgttgccttctgacccttaccagagagctcaggctagattctgggctgattatgttgataagaagatatatgatcttggaaggaagatttggacatcaaaaggagaagaaaaagaagc

SEQ ID NO: 53401 - DNA, 443 bp, Glycine max
  unsure at all n locations
  Clone ID: LIB3167-047-P1-K1-B3
cccacgcgtccgaaagtctctatgaggaactaacttctacaccctctctgncttttccttttgatttccctggccttgtttgcgaaatcagatgcaggaagccttgtggtatattggggccaaaatgcaggtgaaggccaattgacaaaaacatgcaaaacaggactcttccacattgtcaacatagcattcctctcaacttttggcaatggtagtcaacctcaaatcaatcttgcaggccattgttcccctgcatcaaagggttgcaaaaggttaggcaaagatatcaagaactgccaaaggagaggcattaaggttatgctttccattgggggtggcaccaacacctactccttgtcatccccagatgatgctagacaagttgcagactacatttgggccaacttcttgggagggaaatcaaactctaggccttttgggaa

SEQ ID NO: 53402 - DNA, 427 bp, Glycine max
  unsure at all n locations
  Clone ID: LIB3167-047-P1-K1-B5
cccacgcgtccgcccacgcgtccgcgaaaatgataanttatatttggttttgtttgtttctgggggggatccgcgttctcacaccagttcggcattggttaggtcgatttcgtttttccggtttggatatggattcggaggatttccgatccattctggagagcgcgggcgtggacgtttgggccctcatggacgcggccatcgcggtggcctccgccgaccacgctcacgagttgaagcgccggagagatggaatcgttgagcgcctttacgcggccagttcaccgccgccgctgtgtcggaactgcgacgccggcgacgggggagaaatcaggacgcagagcagtccctccgcggaggaggaaaaggatccctacggaggcttgttcgacgacgagcaacggaagattctcgacattaaagagca

SEQ ID NO: 53403 - DNA, 394 bp, Glycine max
  unsure at all n locations
  Clone ID: LIB3167-047-P1-K1-B6
gtccggagagaaagatgggtaagaaggaagnggctttgttgttttagatgcgagcctatnccgggagagagggaaccttctccgtacttctctttctccttttgattctaattcttcccatcatttaaagtttcttccttcgttaacactttctcttctctccctctccttcttcttcattcaaagacttcgcctttttgttctaaacagagagagcaactcgtttccgattaagggtcttgtttcttttgttgtggtaatgctcgaatcggtttctcactgcattctgggtgatttagggatcggttagtttttgtgggggtctcattagcatttcaaagtttcgtgcttttttgttgctgggtgtggagagagagagagagagagatccccg

SEQ ID NO: 53404 - DNA, 425 bp, Glycine max
  Clone ID: LIB3167-047-P1-K1-B7
cccacgcgtccgcccacgcgtccgcctacgtgaccttgttgatgacgataaacaactgtttgcagttccagaaacagtaccagacgacgacgcagtacgtgaagatggaggagcacaattttctcagcgccgacgaggcctgcaatttcttctcggacgaacaagcaccaactctgcagtggtactgttcagaggaatggagttaagagggaagaagaagaagcttaattaattgagagcgagggagggaatagaaagaataaggcattttgcagggtgtatagtaatgggatggagagagaaacattgtaaaaatgaaatggtcaaggattgaagaagagagggaaattgaagagcttgagagagaggggatggggttgaagcacgcatggcgtggggtcggagatgagaggttgatgacccat

SEQ ID NO: 53405 - DNA, 436 bp, Glycine max
  Clone ID: LIB3167-047-P1-K1-B8
cagattcagagaccaagtcaaatgatttacttcctcttaatggttttgaacttgtgcactctgcttcacctccacttcctcagagtccaagattgtccccgaagttatctggtttaaaaaattcatcaaataatttagagactagttcaacaagtgctgatcacagcagcgagcagacaaatcttgattcttctgctgaacagaaagtggaatctaaaaaagatatggcagatgtacctggatcaggtgacaatttgcgaaaggatgataaagttgttcaaagtgatgtttctgtggtttctaatgcccctacaacatataaacacccaacccatttggttactccatctgagatattctctaatgctgctttatcttctgataattctcataattctcaaggtatgaacggtcaagatgtggctgcccatagaga

SEQ ID NO: 53406 - DNA, 421 bp, Glycine max
  unsure at all n locations
  Clone ID: LIB3167-047-P1-K1-B9
ggcctcctggcgcctgaggcgccgcttgnattcgttattgccgccacgggctgccgcctgaccatgggcctcgtcggggtctacgatttcgacagcaccttcatcggcgacgcctcgctcacaaagcgcccgatgggccgcgtgttgaacccgctgcgcgaaatgggcgtgcaggtgaaatcggaagacggtgaccgtcttcccgttaccttgcgcgggccgaagacgccgacgccgatcacctaccgcgtgccgatggcctccgcacaggtgaagtccgccgtgctgctcgccggcctcaacacgcccggcatcacgacggtcatcgagccgatcatgacgcgcgatcatacggaaaagatgctgcagggctttggcgccaaccttaccgtcgagacggatgcggacggcgtgcgcacca

SEQ ID NO: 53407 - DNA, 439 bp, Glycine max
  unsure at all n locations
  Clone ID: LIB3167-047-P1-K1-C1
atcctttctcttccaatcattaattaatnaganttganttgatttgattnaccttaatcctgcgggtgctttttccttccctcaactccaccattcctgatttttctgcatcagtctattcaagttcattgtagggtgtatatccttgattttgtgtgggtttgagttagggtgcatgtgaatgaaaaggagatttgctggaggtgatgcatttgcatagatgaaggcagaaaaagtttggcgtttaggcagcatgggtgatatgcagatactgcctgggtctcgccaccgtcctcccatgaagaagccgatgtggattattgtcttggtgttgtttgtctgtgtctttctaatctgtgcttatatctacccaccgcagagcagttcagcctgttatgtcttctcttccaaagggtgcaagggttttgttgattggctt

SEQ ID NO: 53408 - DNA, 268 bp, Glycine max
  unsure at all n locations
  Clone ID: LIB3167-047-P1-K1-C10
gccggcggcggcaacagcagcaactttttcaggagnaatggcgcacctacacagcttcgggcggaagaagacagcggtggcagtgacctactgcaagcgtggtcgaggcctcatcaagatcaatggctgcccgatcgagctggtggagccggagatcctccgaatcaaggcctttgagccaatccttcttcttggacgccaccgtttcgccggcgtggacatgcgcattagaatcaagggcggcggtcacaccttccagatctacgcc

SEQ ID NO: 53409 - DNA, 428 bp, Glycine max
  unsure at all n locations
  Clone ID: LIB3167-047-P1-K1-C11
gttcatatgattttcttggtataaatttttataccttatatttcgnggaatatgctccaccgaccaccactaacaagacctatttcactgatatgctagccaaactttcttcgaccaggaatggtgtacccattggcacaccgactcctctgagctggctctttatctatccggagggaatttataagctcatgacatacataagggacaactacaataatccaccagtgtacattaccgaaaatggcgttgcggaatcaaagaatgactcacttgcaatcaatgaagcccgaaaggatggtattcgaattagataccatgatggccatctcaaatccctgcttcatgcgatcaaagatagagttaatgtgaagggctactatatatggtcattttcagatagctttgaatgggatgctggttacaca

SEQ ID NO: 53410 - DNA, 425 bp, Glycine max
  unsure at all n locations
  Clone ID: LIB3167-047-P1-K1-C12
cccacgcgtccgcagggctttcattccttctttgntatggataccctttcaaggattagattgctccccacttgttacagtcttcagttcccaaaaatctctgcattatctcgtttcccaaatgctttttccacagccactcccctggtttcagtgctaagagtaagagctggtcctccttcagtgagtgatacagatgaggatgtcttgcaaatattttttaaggagagagaattaaatggggattttatatcaagagcttccgatttattatggagaagagatttcagaagttctggtgattatgatattagcgagctcaccgacaacacttctcaacaaatagagcagatcatagagactgacagtgatggtggttttttgaaacttacaagaacccaagagtggctaacaggtgacaattc

SEQ ID NO: 53411 - DNA, 341 bp, Glycine max
  unsure at all n locations
  Clone ID: LIB3167-047-P1-K1-C3
cggaaancccggggccgcccaacgcgtccgcccacgcgtccggttaccctctnctaaggttgggtcattcctgagnatnncagagaatacacgaggagggccttgcatggccctgctcacactaatgctggatggttcaatgatttccttaataccatattcttttcttccccaacggttgcattgattgttgctgtgtttttggacaacactcttgactacaaggatagtgccaaagataggggaatgccatggtgggcaaagtttagaacatttaaaggagaaagccgaaatgaagaattctacaccctccctttcaacctcaaccgcttcttccctcc

SEQ ID NO: 53412 - DNA, 297 bp, Glycine max
  unsure at all n locations
  Clone ID: LIB3167-047-P1-K1-C4
ccgccctttttttttttttttctgttacggccggtttgttcagtgnnctncctgacaagaatgtaatcttgaagccaagagacaccagcttgttgtaattcttaagagtctcgggcagtgccggtgcattgcccttgttaacccattcatcatacaaggtcgagttaaatttctccaccccatatccatgttttttgtagtatggaatattagagagtacggtgccatctatactgaacacaaatgtgtccttgggatggacctacaatggcctcagccgcagcccccacaactttc

SEQ ID NO: 53413 - DNA, 412 bp, Glycine max
  unsure at all n locations
  Clone ID: LIB3167-047-P1-K1-C6
agcaagggataaagatggaccccaagncnggcatggnttctagaacatngnngnggctgncaacgagattctatccagaatagaatgatcccttgtcttttgatattggagattgacctgttcttgataagtttatgccaacagctgacaaaattgcttgtttcaagaagtggtgtagtgaaggatatgcactcaaaagtaggctgcacaatgaaataaccctgtgatatagaattatagatcaagagtttgatcattcagagttagataatactgatcaatgtttaatatatttgacagaaaaatgatgctcagcttctgtgacatcattgatcaggagctttagaaaagaacgattgtaagcatatncaatttgataaagagagatctgagattaagttttgaactgttc

SEQ ID NO: 53414 - DNA, 370 bp, Glycine max
  Clone ID: LIB3167-047-P1-K1-C7
cccacgcgaccgcccacgcgcccgaaataataaaaaaacaaaaacaaaaaaaaaaaaaggggggaaaaaaaaaaaaaaaggagaaaccaaccaaagggcggccccacaaaaggacccaaccgaacgaacccgggcaagccacgcaaaagcccaaaaaaaggggcaccaaaaaccaaagcacgggccgacgtgcaacaacgacgggacgggaaaaacccgggcccaacccaactaaaacgccaggcaaaacaaccccccatcgccagcgggcgaaaaagcaaaaaggcccgcaccgaacgcccaaccaaacaggggcccagccagaaaggcgaaggggccgccccccgaaacggcccaaaaagcccgccgg

SEQ ID NO: 53415 - DNA, 321 bp, Glycine max
  Clone ID: LIB3167-047-P1-K1-C8
agaaataaaagagccatataatagatagagtgatttggagatggcagacttaccagggtatcttcatgcctgtttgaacacagggaagcttgcctccttggcaattttggtgtctggaggaatcgtcttgcaaattttggcatgtgccttgtataataactggtggccgatgctgagtgtgttaacgtatgtgcttcttccaatgcctttgctgttctttgcggggtctgatgattctatattttctgaatctgataatagctgggtaaattttactaagttcttgactggagccttaactgtgggaggcattgccatttc

SEQ ID NO: 53416 - DNA, 396 bp, Glycine max
  unsure at all n locations
  Clone ID: LIB3167-047-P1-K1-C9
gggngggacattttnnnncncncactcaaataaactttttcgaagaganaacanncaggccggattcattaaagcgcacagcggactcttttttttttttnnnttttgnctaactatggctcctgtgctgagcagaaccatggccacggcctctctggcctcgcttcctccttcttccccttttgcgaggacttcccttctcagaagcgcttttctgccgccgcaaatagggctcggcaggaactgcttcttccccgccgtggggctgcggtggacgcagcatctgcttgagggaaggaggggagggctaaccgtgcggtgtgaggccactgtggcggagaaggactaggccactcgggagaagtttgagtaccaggccgaggtgagtcgattatt

SEQ ID NO: 53417 - DNA, 264 bp, Glycine max
  Clone ID: LIB3167-047-P1-K1-D1
aacaatttgactatcacaaacctggcagactttcatatatgggtggcatgaactctagcgtattgacctgtcactaggccatatatcacacaacatgctccgagctcaacgggaaggtgcacatcctggccgtctgggcatgctctggctacaagaagccaccgatcaaatccgaggcctgaggagccaaagccagacactctgggagcaggagaggcgcccttgggctgatggcagctacacttggcatatcagcagcctaca

SEQ ID NO: 53418 - DNA, 437 bp, Glycine max
  unsure at all n locations
  Clone ID: LIB3167-047-P1-K1-D10
aaatcagtctctaatatttttctcactgnnctgncttttcagagaactgnatagagagagatggcagctgcaacatctggtgctgtgttaaatgggttgggatcttccttcttgagtggaggaaacaggagccaaacccttctggccactgctattggaggcaaagttggtgctgctgctgttactgttagtcctagaagactcattgtggtagctgctgctgcaccaaagaagtcatggctccctggtgtcagaggtggtggcaacctcgtcgacccagaatggcttgatggatcgctaccaggtgactatggctttgacccactaggccttgggaaggacccagcattcctcaaatggtacagagaagctgagctgattcatgggagatgggcaatggctgcagttctaggaatctttgtgggccaagcatggag

SEQ ID NO: 53419 - DNA, 411 bp, Glycine max
  unsure at all n locations
  Clone ID: LIB3167-047-P1-K1-D11
agaactccaagtnacccnggagaaactggctaaatttttaaangagccngcngaaaaggggggccttttaactgtgtcaaacaaactctacaaagagctcgagctcgaggtctctaagctctcatctgagctcactgaggttaatgaatcgctacagagaaaccttgatgatgcgaaacatgaggcagaaatgctagcaagtgagcttacaactgccaaggaacacttgaaggaagcacaagcagagctgcaaggtgtgtcaaaagaattgacagctgctcttgaaaagaatgatagcctacaaaaagaattagttgaagtctacaaaaaggctgaaagcacagcagaggatttgaaggaacaaaaacaggtagttgcttctctgaacaaaaatttacaagcattagagca

SEQ ID NO: 53420 - DNA, 436 bp, Glycine max
  unsure at all n locations
  Clone ID: LIB3167-047-P1-K1-D12
cttcatcatggcttcctcgcgcgcacctttctacatttcagctgnagccanctccacacgcgggtcctataagaatggatcactcttgggaagcacaaaagcttcttttcttagtgggaggaaactgaaggtgaacaactttacagcaccagttggagcacgatccagcactacagtttgcgcagttgctgagcctgataggcctctgtggttcccaggcagcacccctcctccatggctagatggcagtttgccaggagattttggctttgatcctctaggtcttgcatctgatcctgagagcctgagatggaatgttcaaacagagcttgtgcactgcaaatgggccatgttgggagctgctggcattttcatcccagaattcctcacaaagattggtattctgaacaccccttcatggtacactgctggagag

SEQ ID NO: 53421 - DNA, 424 bp, Glycine max
  unsure at all n locations
  Clone ID: LIB3167-047-P1-K1-D2
gcttggcatggtaattatgttccatagaagtattanntttgcaaatnctgcccttataatacaggtctgtttgatcatagtgacccatctatcaatactgtgttgaccgcaccaactgataaacctggagtggcattgcttgattttgtcattttcccacccagatggctggttgctgagcatactttccttcctccatattatcatcgcaattgcatgagtgaatttatgggccttattcatggtggctatgaggtatatcatatcaaattttgtcttttaatcgctgtttgtgggaagcacgaaggatttgcatcttaatggtagtttttttggtaatatgggaaaagagcaggattagttttgggtcagttgagacaaaattttgtcttctctagtgttgtgactaacacatttgtttttg

SEQ ID NO: 53422 - DNA, 442 bp, Glycine max
  unsure at all n locations
  Clone ID: LIB3167-047-P1-K1-D3
ctccttctcgcagagtgagcgagcaagcgatttatcctattccacaccaanggcatgctcaggcgcgctctgcttccctcttctccgcaaacccaacacccctcttctctcccaaaccctctctctccctccaccttaaccctctccccacgcgcccttctccctccctcacgcgcccttctctctccctcacgcgcccttctcactctcgccgctccttcgttgtcaaagcctcctccagcgagcttccgctggttggtaacaccgcaccggatttcgaagcagaggctgtgtttgaccaggagtttatcaacgtgaaactatctgattacattgggaagaaatatgttgggcctcttcttctacccgttggacttcacctttgtctgccccacagaaatcacttgcttcagtgaccgacatgcagagttcgaggcactaa

SEQ ID NO: 53423 - DNA, 440 bp, Glycine max
  unsure at all n locations
  Clone ID: LIB3167-047-P1-K1-D4
cccacgcgtccgtttgatgatgattttgctgccttgattacattcacattngcagntttgatgataatgagcctagcgagcttcctgattacgattttgatgactttggtgctgatgagtttgctggttggattgaagaacccctcaatataccttgcgtatagattttgcagctacataggaatgagttctatccaagagaattacaagttttgtgtcattgcttaaaaatgctctacagttttgtgagatctcaggaaaaaactagttcctgggggtgttgntttgttttaatttatttgtttctttagggagatggaagatcaatgagaggttaagagagaatgccttggttttccttgtgctattagagccgtccaagggtttttcaatttctattatcatgaaagttctgagtgtgtagaagtctatcaaacttg

SEQ ID NO: 53424 - DNA, 387 bp, Glycine max
  unsure at all n locations
  Clone ID: LIB3167-047-P1-K1-D6
cccacgcgtccgcggacgcgngggggannttacatttcctttatctngngcaacngnctntggggggcttcaagttgactaatgatgcattcaattcactaaaaaatatgccaaggttgttgttcctggatttaagttacaatgcttatgaaggtgaaactttgaattttcaaggtggagggtttcagaaactaaagcgactgcaactcagatatttggatcaattgaagtgcatccttatcgacagaggagcactgtgttctgtggaagaaattgttttacaagacctctcccaactcaaaacagttccctcgggaattcaacacttggagaagcttaaagatctctatatcaactacatgccaactgaattggtgcaacgcattg

SEQ ID NO: 53425 - DNA, 436 bp, Glycine max
  unsure at all n locations
  Clone ID: LIB3167-047-P1-K1-D7
gatagcagaaacaataggagtaggaaaacctgngtatgaatccgacgnggcaaggctgccatacctgcaatcagtgataaaagaatctctgcgaatgcacccaccagcaccactgctactgccacgaagggccaaaacggacgtgcaagtctgcggctacacggtcccacaggggacacagatcctcatcaacgagtgggccataggaaggaacccggccatatgggaagacgcacataggttctcgccagaaagattcttggactctgacatagacgtcaagggtcgccacttcaagctcacgccgttcgggagcggaagacgaatttgccctggctcccccctcgccgttaggatgctgcacaacatgctcggttccttgatcaacaactttgactggaagcttgagaacaacattgaccccatcgacatggac

SEQ ID NO: 53426 - DNA, 395 bp, Glycine max
  unsure at all n locations
  Clone ID: LIB3167-047-P1-K1-D8
gtctgaagcatggcttcatggagcgcatcaattaccttgatgctggnccaccctcaagaccggtctcgctctcagagaaccacattctctctctatcctctcctttttaagccctccaaatgcctccacatagagcccaaatccaggacttgccatgccctcgtcgccgctttggctgcagaggtccaagtgcctctaactgtccacgacacggaggaggacgacggttctgatggctccaccgccacctacgncgncaccaccaccaccaccaccaccaagcctaagaaaggcaaggccgcgttgcctcttaagagggacaggacgagatctaagaggttcttggaaattcaacaattgagggagcgtaagaaagagtatgacttgaagacagc

SEQ ID NO: 53427 - DNA, 242 bp, Glycine max
  unsure at all n locations
  Clone ID: LIB3167-047-P1-K1-D9
agccactgcagaggngngagcaacaacacattaactttagaagaaagcgagagngaaaggcgggctgtttacacaattgctctgttctcccattcaacacttgtctcccgggcaaacccaaggcagattgttcttgagaatcaatatcaaatcagaaaaggcttcttcagatgattcttggtccctcaaaaaccgtggtggggtttggatcatcggacacagctgctgtgcctgttagcagt

SEQ ID NO: 53428 - DNA, 302 bp, Glycine max
  Clone ID: LIB3167-047-P1-K1-E1
cccacgcgtccgattaaccatggcttttattacttcatattcatcatttgcttccctcagtgtcggtgcatcctttcccatttatatttgctcttcttcttccatgtttccaccgcctcaaaaaccatgctttaaacctagagagggatattctgtcattcgtgtcttaagtgtccgtggttattttccttagacttaataaatccctctcatcttttactttcagcttaaaccaatatacattattcatataaatgttgcttaagagaatatagattgttggcggacattgctgcttgaaa

SEQ ID NO: 53429 - DNA, 443 bp, Glycine max
  Clone ID: LIB3167-047-P1-K1-E10
cccacgcgtccgattgtttgttgttgttacctgatcttcttcttttgttgttctgtgtttgtgtttgttttttctctcacctgaaaatgtcttgctgcggtggtaactgtggttgcggaagctcctgcaagtgcggcaacggctgcggaggctgcaagatgtacccagacttgagctacactgagtcaaccaccaccgagaccttggtcatgggagtggcacctgttaaggctcaatttgagggtgctgaaatgggtgtgcccgctgagaacgatggctgcaaatgtggaccaaactgctcctgcaacccctgcacttgcaagtgaggtgttgggagagcaagcttcaagcagagatagcccttaattaggaataatgataaactattaatgtgtagctaaaaacttatgtattatgtctgtgatggttttcgtgcactctgg

SEQ ID NO: 53430 - DNA, 446 bp, Glycine max
  Clone ID: LIB3167-047-P1-K1-E12
gccactctaaagaaaatggctggagccttaactaaatttagaagatcgcgaagaagagggtgaggaattttaagaggcctcagagtgacatgaaaatttctgtcaagacaaactggcgcagaccaaagggtatcgattcccgtgttaggagaaagttcaagggatgcactttgatgccaaacattggttatggttcagacaagaagacccgccactatctccctaatggttttaagaaatttgttgttcacaatgtgaaggacttggaactgctcatgatgcacaacaggacttactgtgctgagattgcccacaatatatccacaagaaagaggaaagatatagttgagagagccgcgcagcttgatgttgttgtgacaaacaaaacagccagattacgcagccaggaggatgaatagtctaaatgactaaaaaagtcacttatc

SEQ ID NO: 53431 - DNA, 404 bp, Glycine max
  unsure at all n locations
  Clone ID: LIB3167-047-P1-K1-E2
cattgcggttatcataagtacgggaattaaccctaaggccaaatcgtactatctctttgacggttgcgcgcacctctcttcgggtctcgcttgtggcctcgctggcctctccgctggcatggccatcggcatcgttggcgatgccggtgttagagcaaatgctcagcagcctaaactttntgttggaatgattctcatcctcatttttgctgaggcattggcattatatggtctcatcgttggcatcatcctctcttcccgtgctggccaatccagggctgactaataaactntccagttggatgtggtacacagccacagattgtgaatgttactgtggagtccgggtgggtaatgttagtacacagactgctgctttggcttgctcatgtgattctatttat

SEQ ID NO: 53432 - DNA, 291 bp, Glycine max
  unsure at all n locations
  Clone ID: LIB3167-047-P1-K1-E3
attaaatcatcttcgttcttcataataatatnaatgctcaagagcgcttcaggttccacgttgggcccgggcggcctggacctaacccaggccttcttcaggcccataaccaacgcggctcctccctttccgaccaagcgccacaacaagatctccgtgatcggcgccggcaacgtgngaatggccatagcgcagaccatcctcactcaggacctcaccgacgagctcgtcctcgtcgacaccaacaccgacaagcttccgcggcgaagatgccttgacccttcagcacgc

SEQ ID NO: 53433 - DNA, 437 bp, Glycine max
  unsure at all n locations
  Clone ID: LIB3167-047-P1-K1-E4
cccacgcgtccgcttcattcttcactcttcacnctgcattcccaaccctagccaaacgcaagcgagtcattcattcagttcaggaactcacctcaccatggccgcatccattacattgtccaggctcgtctcttccaccctcaccactgcctctttcttcccacccataaccctgccttccaaactctcctctctccgactccccacccgccgccaccccaagccactcagattctcctcctccaccatcaccggcaccatctccgtcggcgacaagctcccggaggccaccttcttctacctggactcgtncggcgaggtgcagacgacgacggtgtcggaactgacgaaggggagaaggcggtgctgttcgcggtccccggcgctttcacccccacgtgctcgcagaagcacgttgccggcttcgtggagaaatc

SEQ ID NO: 53434 - DNA, 433 bp, Glycine max
  unsure at all n locations
  Clone ID: LIB3167-047-P1-K1-E5
cagacagagaagagaatggacgctattgattcngtgntcgatccgctcagggaattcgccaaggacagcgtcaggctcgtcaagcgatgccacaagcccgatcgcaaagaattctccaaggttgctgtgcgtaccgcgatcggtttcgttgtgatgggattcgtgggttttttcgttaagctcatcttcaattccaattaacaacatcatcgtcggatctggttaggatgaggggaatcgcaatcgcctcaggaattcaagttatcaaacaaaatgagaggcagaaagagttccaacttcaaatagatagctcaatgaaattaattgtagttctgctgtatttcatttttggtttacctttgtatcttcggaagcattacaantttatttgaaatgtaaaattttgtttttccatgtgctggacctttagaca

SEQ ID NO: 53435 - DNA, 216 bp, Glycine max
  Clone ID: LIB3167-047-P1-K1-E6
ccaaaaatctcaagtctggctacccgatcgtcatgtatgattctgtattttcataaccatttattccaataacaacacatcgcgatcgtaggatagggaatccaaccctcagaatcaagttaaacaaaataagcaaaaagtccaacttcaaaagatactaataaataatgcagtctgctgattattttagataccattgatccggaagcatacaat

SEQ ID NO: 53436 - DNA, 422 bp, Glycine max
  unsure at all n locations
  Clone ID: LIB3167-047-P1-K1-E7
caatggagttcccacactcccttccctggctaactccatcccttctcaccttctcttgcccgacaattccatccctgaaaacggtgttcattggacagaaacccctgactctcacatattctcagctgacatccctggtgtgaggaaagaggagctgagagttgaggttgaggactcaaggtacctcataatcagaactcaagcagtggatgaatccacagaaccagcgaggaagtttgagaggaagtttaggctgcctgggagggttgatcttgatggcatctctgcagggtatgaagatggagttttaactattacagttccaagatcacttaggagaggtttctacattgaccctgctgatgttcctgaaaatttggaaagttcttgcaagagctgcttgaatganataatgaatgaat

SEQ ID NO: 53437 - DNA, 414 bp, Glycine max
  Clone ID: LIB3167-047-P1-K1-E8
cccacgcgtccgttctcattcaccaattgcgttcactcgtcgccagtggcagtggcgtggctggaatcccctgcggcaacaccggcaccgccgcactcttccctcaccgaacgagaagaaacctccacgtggcgcgcgcgaagaagcccctcaacggcgacgacgtttccgtttacgctgagctcctcaaagccgaagtttccgttttggaaaataataagcctctcgacgacaacgatgccgctttgaagttcctagagaagatagaccgtcagtttcaacagcccgatttatgggaaggaccccagtgggactggctcggcatcttcatcaagttttcccccatcattggcatcgctgttgcggcaagtcttgctatctacggttgctttacatttcatgaaccaccaaaaa

SEQ ID NO: 53438 - DNA, 417 bp, Glycine max
  unsure at all n locations
  Clone ID: LIB3167-047-P1-K1-E9
cttcattctagccattcgaattcccaagcttaaactcctaataccttcaaagaacgaagtaggggatcagtgatggcacctaaggcagagaagaagccagcggagaagaagcccgcggaggagaagaagtcgacggtgggagacaaggctccggcggagaagaagccgaaggccggaaagaagcttccgaaggagggaggagccggcggagaaggggggaagaagaaaaagaggaacaagaagagcgtggagacgtacaagatatacatattcaaggtactgaagcaggtccaccctgacattggtatctcaagcaaggccatgggaatcatgaacagcttcatcaacgacatcttcgagaagcttgctcaggaatcttccagaccnggcccgctacaacaagaagcccaccatcac

SEQ ID NO: 53439 - DNA, 385 bp, Glycine max
  Clone ID: LIB3167-047-P1-K1-F1
ctagaacgcaggcgttgagttgagaatggatggatggatacgaggcacgattctggtcaccaacgacgactgtatcgatgctcctggcttaagagcattggttcactccctcgtcaacgccaaccttttaaacgttctagtgtgcgctcctgatagcgagaaatcagctgttagccacagcatcacttggctccatccagtagctgttaagcaagtacagatcgagggaaccaccgcatttgctgtttctgggactcccgctgattgtgcttctctagggatttccaaagctctctttcccacagtacctgatctggtggtcagtggcataaacaagggtagcaactgcggttatcacattgaaagggaggcactgatgcagtat

SEQ ID NO: 53440 - DNA, 445 bp, Glycine max
  unsure at all n locations
  Clone ID: LIB3167-047-P1-K1-F10
cccacgcgtccggttttaggtnggncttaatgngtatatgtccttgaatcttcattctctgaggggaagttcctctgttgagtggcgtcacggattaatagtttccagaagacagccattgacttggtacaaaactacctttgatgccccagctggagttgcaccgttggctttagacatgggcagcatgggcaaaggtcaagtgtggataaatgggcaaagcctaggccgctactggcctgcttacaaagcatccggttcttgtggttactgtaactatgctggaacttacaatgagaagaaatgtggaagtaactgtggcgaggcttctcaacgatggtatcatgttcctcactcatggctgaagccaagtggaaatttattggttgtgtttgaggaattgggtggngatccgaacggaatctttttgttagaagggatatag

SEQ ID NO: 53441 - DNA, 442 bp, Glycine max
  unsure at all n locations
  Clone ID: LIB3167-047-P1-K1-F11
ggtggctgaaattttcatgtctggtgggcattttgtaatttctctttgagcaatcacctgaaagcatgagaagcagtgctacagcactgtactgcataaccacagccattgggaactacatgggtacattgctggtgtcattggtgcataagtacactggcaaggagaataattggcttccggataggaacctcaataggggtggattggactactattattttcttgttagtgggattcaagttgtgaatctcgtttattattttatatgtgcttggttttacacttacaagtccgtggaagaaattagtgaaaagaacaaggaagaggatttggaacaagccaacgaacatgtctcatctgatgacaagttaaatgatggtaaggaggaagaaaagagaggattaacgaaagatgaatgaattgatggggtngatattag

SEQ ID NO: 53442 - DNA, 447 bp, Glycine max
  Clone ID: LIB3167-047-P1-K1-F12
aaatgaacgacgacttgaccaaaatgcttcatgctactgcacaagtgttggcatctcaaaagcggttgtaaaataaatacaaggctgcacaacaagcttctgaagagtggtaccggaaagcacaacttgctcttcagaaaggtgaagaggatcttgctcgtgaagcacttaagaggcgtaaatcttatgcggataatgccagttctttgaaagctcaacttgatcaacaaaagactgttgttgagaatcttgtctctaatacaaggcttttggagagtaagatacaagaggcaaggtcgaaaaaagatactctcaaagcaagagctcaatcggcaaagactgcaaccaaggtgagtgagatgctgggaaatgtcaatacaagtagtgctctttcagcttttgaaaagatggaagagaaagtgttgacaatggagtcccaagctgaag

SEQ ID NO: 53443 - DNA, 435 bp, Glycine max
  Clone ID: LIB3167-047-P1-K1-F2
gtgattgggagcactttacccttcgtataatcaatttcaccggagagctatggtctgtttacttctctcagcatagtggaggtggatggatacatgcatttgatctggagtttaataaggggaataagccaattgtttattcatcaaaagatggccatgctagcttccctcatcccgggacgtaccttcagggatcatccaaactaggaataggagtacgcaatgatgcagctcaaagcaaatttattgtggattcgagtgtcaaatatcagattgttgcggccgagtatcttggtgaaggagtcattacagaaccatgttggttgcagtatatgagagagtggggtcctaccgttgtatatgattcacggtctgagaaagagaagataataaatctgcttccactatttgttagattttctgtggagaacttat

SEQ ID NO: 53444 - DNA, 417 bp, Glycine max
  unsure at all n locations
  Clone ID: LIB3167-047-P1-K1-F3
ccctcgcgatgcatggcggacaacaaataaaattgttttgtgaagngcagcgcatgtcaagcgagacacctattagagcgcaggcgaagcacacaccaaaaggacgaatgagaggaatggaagtgattgacacaggagctgccctaagtgttccagtaggtggagcaactctaggacgaattttcaacgtgcttggagagcccattgataatttaggtcctgtagatactcgcacaacatctcccattcatagatctgcgcctgcctttatacaattagatacaaaattagccatttttgaaacaggaataaaagtagtagatcttttagctccttatcgtcgtggaggaaaaataggacttttcggtggagctggagtgggtaaaacggtactgattatggaattgatcaataaca

SEQ ID NO: 53445 - DNA, 446 bp, Glycine max
  unsure at all n locations
  Clone ID: LIB3167-047-P1-K1-F4
cccacgcgtccggttctctgtcactgctgcgnctcntgtaaccatgcctaagcaaatccacgagagtaaggacttccttctcactgctagaaggaaggacgcaaggtcggtgaagatcaagaggagcagagatgtggttaagttcaaggtcagatgctcgaagtacctctacacactttgtgtgtttgacccagagaaagctgataaattgaagcaatctcttcctccaggtttgagtgttcaagacctgtaaaggtacagggcgagagaccaagaagaagcaattcattgattcttctgaacttcgtttctctgtagttgaaacttgagattcttttcagtttcttttatttttagatcattgctaggacatggttgttttcatctgttttggaaaatgatacttgaatttatgtctaatggattattctagcgctgtggaacta

SEQ ID NO: 53446 - DNA, 448 bp, Glycine max
  unsure at all n locations
  Clone ID: LIB3167-047-P1-K1-F5
gttgtaactcgttcttcttcttttggtggtcngtgnntgtgtttgntnnnnctctcacctgaaaatgtcttgctgcggtggtaactgtggttgcggaagctcctgcaagtgcggcaacggctgcggaggctgcaagatgtacccagacttgagctacactgagtcaaccaccaccgagaccttggtcatgggagtggcacctgttaaggctcaatttgagggtgctgaaatgggtgtgcccgctgagaacgatggctgcaaatgtggaccaaactgctcctgcaacccctgcacttgcaagtgaggtgttgggagagcaagcttcaagcagagatagcccttaattaggaataatgataaactattaatgtgtagctaaaaacttatgtattatgtctgtgatggttntcgtgcactctggtgttttgtgttaaacaaacatccttag

SEQ ID NO: 53447 - DNA, 468 bp, Glycine max
  Clone ID: LIB3167-047-P1-K1-F6
cgggtcggcccaacccgtccgcccacgcgtccggaagaaaccacaaccaaataatcaatgtcactcaaagatggacacaaagccctcgacacctttgctttctcgaagtctcagctggtcttgtcccaattgcatccttttcttcaggccacaacaactccttctactgcctctctctagctagttccttcttcttcttcaaagattctgtactatataaaatcaaaggaagaaaagaggcctaattaagtagctttcagttgtggaatcatcatattgcagcgttgatggggcatttttcatctgcgttcaataggttggcaaagtcttttgcaacgaagaaagggaggagttctgatgaatgtaatggaagagaagcggcggtagcaatggcaaaggaagccaaaagaaatcacttcatgttgcatagctccggcacagttaatgttgatggttctaacaactttg

SEQ ID NO: 53448 - DNA, 411 bp, Glycine max
  Clone ID: LIB3167-047-P1-K1-F7
agaaattgtgttaccagagcagaagaatcaataagtagttgatagctggaaaaatgtagatagagaagctagagagaggagaaaagaaagggatgctgatttagaaggggataggtctgataaacgtaccaagggccttgacaaggaatcaaacgatgggtgtgctgatgtagaaggggtgatggagaaggagagggaggtctataattatagcagtcagcaccgtaagaggatacaacgatctaggggaagccctcaggcgccgaaccgggagtcttttttcagatcccatcctcaagacaaagacgggtctcaaggtaaagtagaagtttcttctgttgtttataaagttggccaaaagcatgcaagaactgataaagttgtggaaagaacatgaatcattttaatctg

SEQ ID NO: 53449 - DNA, 412 bp, Glycine max
  unsure at all n locations
  Clone ID: LIB3167-047-P1-K1-F8
ctttgatctgatctcatttccattcattcattcgntgttcttctttccaccaacaagaaaggaaacagagagaaactttcatttcatagattttcatcatctcagcaaaggaatcaatcaatcaagccatggcaggcttcagtggcgacgaaaccgctcctttcttcggcttcctcggtgccgctgcggccctcgtcttctcctgtatgggagcggcgtatggaacggcgaagagtggggtgggggtggcgtcgatgggagtgatgaggccggagctggtgatgaagtcgatcgtgccggtggttatggcgggagtgttggggatttacgggttgattattgcggttattatcagcactgggataaacccaaaggctaagtcttactatctctttgatggatatgctcattt

SEQ ID NO: 53450 - DNA, 439 bp, Glycine max
  unsure at all n locations
  Clone ID: LIB3167-047-P1-K1-F9
cccacgcgtccgcttcgagtnncacagttgataangnttgagggnnncaaaaganggagggcaggcatagcttctggcaattgggccatgaactccgtggacactcaaaagcatcggaggatcacaaatggttaatggttgcttcgaaattggcggaacagacaagattgaagggggagcgtgtgaacaaccttgatctttcaaagggccccattgaaacaaggtcaagggataaatttgggttccaggaagagaacaaatttgattctcttaacttaagcatgttgaacctggactctaaatttactgagaatgtgagcaaaagctcgcttcgaaatggtgtttatggtatgaatgcagtgtatcaaaaacaatgcaaacttggtgagtaatgtgatcagtaacaagtacaatggtaatattctttataacaaagaga

SEQ ID NO: 53451 - DNA, 406 bp, Glycine max
  Clone ID: LIB3167-047-P1-K1-G1
agaggagaagcccttgatttctctggtctattctttttatgttgcacgcatagaacacctctttgcagaggagcttcatacaccggattcctttcttgtcatttttaatggtttaatccttggcaagcataggaggccactgcattttgctactagaattagaaagttgcggagagcaggtgaaattggtgagtttgtgtctgtctatgtcaatgaaaagcagcattgtgtctacttagcttctgatggtggtagagtttgccgtcccctggtcattgctgacaagggaatatcaagaatcaaacagcatcatatgaaagaattaatggatggagtatgcacatttgatgattttttacgagatggcttgcttgagtatcttgatgttaatgaagaaaacaatgct

SEQ ID NO: 53452 - DNA, 440 bp, Glycine max
  Clone ID: LIB3167-047-P1-K1-G10
gaaagtttgaggaaggaagcaatgaatacatgagtgagaagccaaagaaaaaggagaagaatgttaaaagggacgaattacagggaaagattggaagtatttatatcccagatcagaaggttggagaaactcctttaccttacaaagcaaaaggagtgaagagggagcgccaagaagccaagcggaaaaatgagagtgatggaagtgcttcaaaacggaagaaggaagattcttgatacttataaattacacctgttgtctttcccttgcatctgattatagaatgatcaattgtagatcatatgatattaaactgcatgttgtttaggcgtcatgaatattcatgatttcccctatatgggggggttttgtcatcattttattcagcgtatttttttatccttcatattttgccaaattgaaatgcagtcctttgaatc

SEQ ID NO: 53453 - DNA, 384 bp, Glycine max
  unsure at all n locations
  Clone ID: LIB3167-047-P1-K1-G11
caaacacagacacaacacaacacagngtnatggngttacaaccacangccggcggcacgcgaggggaccgagaagaggggaccagacacaacacaacanggccaaaangacaannncacccgcgcggaccncaacacccaccaccccgagaaacaccgcaacaacccacacgncccacacnccccacacagcccaccccaccaagcncaaacgcaaaccganggacagaccanccccgagacgcgccaaccacccccacacagcacgcgcccacacgcgccgcggccccgccacccccgcaggcacacacaccggccaacgggaggaaaagggcaccgacaagcaacngggcaacnccccacacggcggcggcgaccccaaaaa

SEQ ID NO: 53454 - DNA, 429 bp, Glycine max
  unsure at all n locations
  Clone ID: LIB3167-047-P1-K1-G12
cccacgcgtccggtttgggcctctnctcnctgccnttctctagttnccttctccttcctggggcaagctttggtgatggtaacaatgcaatcattattgataaacttcaaagtgggccatcttcatttgctgccacaatgtatgacccagtaagtgcggctgaaagagaagcaagtgctttggtttcagagagagtgtctcaggcagtggagttgctggagaaagggagggaattgcagactcagggtgactttagtggtgctcttgattacttttctaaggttattgaaagctacaaagacttagcattctcagaatatgcaagggtaggaagagcattggccctatatgaagttggtgacagagaagaagcaattgcagagatggaagacgtttcaatatctctaaaagggtattcagaaatacatg

SEQ ID NO: 53455 - DNA, 407 bp, Glycine max
  unsure at all n locations
  Clone ID: LIB3167-047-P1-K1-G2
aaagacacctctaaagaaggatatagttttgaagtganatgcatcaagaaagaagcgtttgagggagaagagaagttttgtgcaaaatccttgggaacagtaattggttttgccatttcaaagctgggaaagaacattcaagtactttcaagttcctttgtcaataagcaagagcaatacactgtggaaggagtgcagaatcttggagacaaagcagtgatgtgtcatgggctaaatttcagaactgcagtattttactgccataaagtccgtgaaacaacagctttcatggttccattggtggctggtgatggaaccaaaactcaggcacttgctgtttgccactcagatacttctggaatgaatcatcacatgcttcatgaactcatgggagttgatcctggaac

SEQ ID NO: 53456 - DNA, 161 bp, Glycine max
  Clone ID: LIB3167-047-P1-K1-G3
atttaatgcactagctaccaaatgctactagtcctttttggtggcactctatgatattatgttggggatgtattttggtgtatcactgcttgggccttgtttgcctttaatgagagtggcttattaatatcaatatatcacctaccaaacttattgctagc

SEQ ID NO: 53457 - DNA, 190 bp, Glycine max
  unsure at all n locations
  Clone ID: LIB3167-047-P1-K1-G4
ccccatcccaagcgccgccgcgccagctctnccagaaggaagccgacatccagatgatgctagcgcgccgacgtacacctcggcaccaaaaacggcgacgtgcaaatggaacgtgacatcgtcaagcgccgcaacgacgggatttacattattaaccttgggaagacacgggagaagcttcagttagcag

SEQ ID NO: 53458 - DNA, 448 bp, Glycine max
  unsure at all n locations
  Clone ID: LIB3167-047-P1-K1-G6
cccacgcgtccgcggacgcgtgggatgaaattgattgntcttgttttcttcgnngctacaatgttggtagcatggcaatgccatgcgtacgatatgttccctctccgaatgaacactggctatggtgcccgtactccggaggtgaaatgcgcaagttggaggcttgctgtggaagcacacaacatctttggctttgagaccattcctgaagagtgcgttgaagcaacaaaggaatacatccatggcgaacaatatagatcagactccaaaacagttaaccaacaagcttacttttatgccagagacctcgaagtccatcccaaggacacatttgtgttcagtatagatggcaccgtactctctaatattccatactacaaaaaacatggatatggggtggagaaatttaactcgaccttgtatgatgaatgggttaacaagggcaatg

SEQ ID NO: 53459 - DNA, 420 bp, Glycine max
  unsure at all n locations
  Clone ID: LIB3167-047-P1-K1-G7
cccacgcgtccggctgaggatgagttcaactggnttactaccaaggaaggaaagttgactgtggagagggatgttgtgaggactaaaaccatcgatttttcgccaattttgcagttcgaacaagacccggttcagatccttgatgcactgttgccactgtatttgaacagccaggttctgagggcattgcaggagtccttggcgagtgaacttgccgcgagaatgagtgccatgagcaatgccacggataatgctattgaattgaagaagaacttgtccattgtgtacaatagggagcgccaggctaaaatcactggtgaaattctggaaattgtggctggggccaatgccttgcaatagtgcagtttgtaggtattggttacttattataatgatgatggggtggtggttgcccatttc

SEQ ID NO: 53460 - DNA, 343 bp, Glycine max
  unsure at all n locations
  Clone ID: LIB3167-047-P1-K1-G8
cttttgcttagtgggcttccagctgtanncttggacttggcggagaagcttttctttgcaggatttctcattctttccgtggccattgatggaatgcaggcagacactatggtcactggcactgtcttctgtgaccaatgcaaagacggacagagatccctttttgattatcctgttaatggtgcaaaagtaattctgtcctgtgctgacagtaatgggcaaattacaatgtcaagagaagaaacaacaaactggtttggaagctatacaatgaggttcaatggcgcacccgacttgagtggttgttctgcccatgtctcaagcagtggtgaaaggtcaacaa

SEQ ID NO: 53461 - DNA, 358 bp, Glycine max
  unsure at all n locations
  Clone ID: LIB3167-047-P1-K1-G9
cccacgcgtccgggggaacccaaaccgtaactgnataccctaacggagagatggccgagcactgggcatagatattagggacggagaaggacagggtgaactgtccgatctactacaagatcggggcgtgcaggcacagcgaccggcgctcccagcttaacaccaagccgacaatcagcccaacattggttctgtcgaacatgtaccagaggcccgacatgaacatgagcattatcaccaaccctgatcagccacaaccccaatccctaagaccccgacaaggtgcaggatcacttcgacgacttttacgaagatctcttcgaggagctcaacaagtacggtcacattcagagcttga

SEQ ID NO: 53462 - DNA, 154 bp, Glycine max
  unsure at all n locations
  Clone ID: LIB3167-047-P1-K1-H1
ggcaaaaacagtcagattgtattcttacaaannctgnnttaaaattggtgcagntactggagtttgattggttttactatttgcagagacattgaattttgtacagatttgcatgtataataatacatcagttttaacaagaatttgtactgag

SEQ ID NO: 53463 - DNA, 321 bp, Glycine max
  unsure at all n locations
  Clone ID: LIB3167-047-P1-K1-H10
atcgcgagcggccgccctnnnnnnnttttataaantttttttnaaaaaaaaaaaaagggtgggttttttataaattttgtagctcctcaaaaatttttttttattttttttatttttttttttttaaaaaagggaaaaaaaaaaaaaaaaaaattaattctttaaaaaaaagaaaaaaaaaaaaaaaaattctaaaaaaaaaaccgggtaaaaaaaaaagaaattaaaaaaaaataaaaaaaacaaaacaaaaaaggggttttaaaaaagtgggaggggcgaacacaaaaccaaaaaaaaaaacatttatgggccccaatc

SEQ ID NO: 53464 - DNA, 418 bp, Glycine max
  unsure at all n locations
  Clone ID: LIB3167-047-P1-K1-H11
ggcttaacaaagcacagaagggccnctaattcagttatactgcagagngngaacttgaccaagtatatactggagaccagcgtttatccacgagaagaagagactctcaaagagctaaggaaagccactgcaggccacccttggggctttatgggcgctgctcccgatgcgggtcagctaatgaccttgctcttgaagttgttgaatgctaagaagacaattgaagtgggagtttttactgggtactctcttctcctcactgcacttaccattccagatgatggaaagattatagccctggatccagacagagaagcttatgagataggattaccgttcattaaaaaggctggtgtagagcacaagatcgacttcatagagtctccagctctaccggttcttgataaactcttagaag

SEQ ID NO: 53465 - DNA, 472 bp, Glycine max
  unsure at all n locations
  Clone ID: LIB3167-047-P1-K1-H12
agaccgggccggcccacgcgtccgagcccagatcacagaagcagaggaagtatttagttactatctctaagangggncnnngctnagggtggttcggtgtagacaaacgcatgagcaaggaagaagagagattggcctctgaagaagcgcgtgccaaagctgctgaagccgcacagaaaaggcaagagcaatttgagaattctgcagcaggacgagctgctcgtgcacagcaacaagcaatggcaaagcaatctgcaaataccaacaaaggcgaaccagttctaaagtggcaaatgagttgaggttagacattctgtcagttggagttaactntttattacgtgtaagtatcgatgacaggtccaaccagaattatatgctctgcatgcttcccttgttccgaagatgtaaagatctttattgcaataattgtatcacaagcgcgatttgttggttttcagaccaagaaata

SEQ ID NO: 53466 - DNA, 411 bp, Glycine max
  unsure at all n locations
  Clone ID: LIB3167-047-P1-K1-H2
tgctattcctcttaagcttgctactgagtttccatacngtataccttaggtcttccgaattcgaagttaatttgcaagatggctaaggaaaaggctcagatcaacattgtggtggttggtcatgtggaccctgaggaggcaaccaccattaacgagctgaagaagcctgttgtggagaaagaagctccagggcatgccatatgagggcatgcacgtacggcctcggaggggaaccagaaaattatgttaacaaaataatctggaaccctaatgtatcagtgtcatcatcagtgtgtagtttaagctagctttgctatggttacgttctttgagatgagagtcttgatgaacagtaccattctgatgtattgctttccttgaaagttaatgcatgcttcttatcttctgtct

SEQ ID NO: 53467 - DNA, 345 bp, Glycine max
  unsure at all n locations
  Clone ID: LIB3167-047-P1-K1-H3
atgggcacacgtaatccacgagcccgaaatagggtgcntactaattgccaccgaaaagcttgatggggtccatattttcgaacggacggtcatccttctcctatcaactgggcccttaggcccatcagggatcatcttgaatcgtccatcgttgatgtccatcaaggagactagatcaacggctctggatgtggagggcacgttttccaatagtcccttgttctttggggggcccttggaggaagggatttttttgttgagtccaaaagagggtaatggtggtgatggggtggggaagagtggggtgtttgaggaagtgatgaaaggtttgtattatggggcaaa

SEQ ID NO: 53468 - DNA, 463 bp, Glycine max
  unsure at all n locations
  Clone ID: LIB3167-047-P1-K1-H4
cccgacccacgcgtccgggtgtgcttcttgccgagcatnannccccatgcatgncttacagctgaagaacaccctgagattggtttcctcaaagtaaattttgatgagaataagccaatgtgtaaaagactgaatgttaaagtacttccttacttccacttttatcgtgggactgaggggcagcttgaatcattttcatgttcacttgccaagtttcaaaaaataaaggatgccatcgagatacataacacagctcgatgcagcatcggtccacctgtgagcattggcgatctgcttgctgaaccttcttcagttgccaaggatagaccagcagaatctgtgtaaccatagtagtacttatgttctcgcttttgtattataagctgtctcacaaagggaaaccccaaagaaggctgtactccagagaaacttatgatgtaaaggatatatgtactctgtatat

SEQ ID NO: 53469 - DNA, 406 bp, Glycine max
  unsure at all n locations
  Clone ID: LIB3167-047-P1-K1-H5
cggaaaaaccgggtccgccccacccgtccgatttacaccaattgaggatgtcnnnnaantcagctcnctaaaagaaactaaanccactgntcaggggttctcaagtagtcacactgccatctcttccaaggacggcatccaacaaggttatgagaagggttttgcgacagcaacttagcgaaactaaccaaaattctaaaatataatacaatcatgtaatctaatattgaagattggatatcctggaccaggagcgatcatggtacacatttaaaagtattgttctttttggtactagaaaataataatattacggtaattacaatataatgtacaaatggtataaataattcccatttgtaacaatagaaataaaacagaagaataggagtttgaattgtatttg

SEQ ID NO: 53470 - DNA, 429 bp, Glycine max
  unsure at all n locations
  Clone ID: LIB3167-047-P1-K1-H6
gcgtttcttggaactttgttactctcacacatgtctcngtccgttcctttggntncaaccatttgtgtggtgcttctgcttctggtggccactgagatgatggggccaacaatggtggcagaagcaagaacttgtgagtctcagagccaccgtttcaaggggccatgtttgagtgacaccaactgtggctctgtttgccgaaccgaacgtttcactggaggacactgccgtggcttccgtcgcagatgcttctgcaccaaacattgttaattttaaaaaattaattaagagtgctttgatagaagatgatagatctatcatctttctactcgtgttgttaattaaccactttgtgtttgagaataagggttacccattctactatgggtttctttggtgcctcttatttatctagtagagatcctttat

SEQ ID NO: 53471 - DNA, 318 bp, Glycine max
  unsure at all n locations
  Clone ID: LIB3167-047-P1-K1-H7
cgnntccgaccanntccgtcaacgtggggctgatgnnaacccttaccctgnactcgttttnctcatcctggaccgccctgcagggagaagtgggctgctcgtacatnncgaagtcagtcgaaccctcgtcgcccttgggccggcgnnngcgaagacccgtggcnnggacncctgcngcnngttctgcttttcctccacngncctgaaggggcngnntcacggtngnnccggaaggaccnnngcgcgcncnnttcganntgatcnngacgannatatcnncgattcttcgctttgtcgccnnngccgccttttcgcgga

SEQ ID NO: 53472 - DNA, 308 bp, Glycine max
  unsure at all n locations
  Clone ID: LIB3167-047-P1-K1-H8
cccacgcggccgccactgcccacacatttttgtgatttttccaaccagccaanccaacggcgggtctttacgtcttgacatggcaccccgtcgaatgcagacttaaaaaacgagatcttcctcctcctaggttgttgtttgctaacatttcaaaacagttagcaggacactatactctgatatcagtcaaatcatatcacatccaagctccgcgactaagtttgccatgtggtaatgattcataagtacgcggcagcaggggcaaacagtgacttagatcgaggaaggtgctaagataatggaatttt

SEQ ID NO: 53473 - DNA, 439 bp, Glycine max
  unsure at all n locations
  Clone ID: LIB3167-047-P1-K1-H9
cccacgcgtccgggtttttctgtattcccttacntgatctcgcaatttgcttttcattttcgtttgccggattgattcctcaattgcgcgctcattttgtttaaggttctagaaaaggtttcggaccaaagcatagaggttttaggtttttatagtgccagttcttttcacttgtggcattagggtttttgtgacgtttggttgaagactttctgtctccatggatctttcagaccttaattccgctgaaatgcagaagttctactcttagacagtgagttttgagcgcaatgcaactctaaatgacatcttccagcagcgtttcaccaaaacccccactctcgtcaatggcttttccaacctctacgccatggaggtggatcctactgttgagcatgaggacatgggtggcgctgatgggatggacttcctgttcttc

SEQ ID NO: 53474 - DNA, 277 bp, Glycine max
  Clone ID: LIB3167-048-P1-K1-A1
cccacgcgtccggagacatacataaaattgttgctgagggagtaataaaaaaacatggggaagaaggatcctaaccgaagccaaagtcaccaaagatagaccaaaaggggaggtgaatcttggcgagccggtttatcaggcgatgttggttacaataaatgttgttttattgtgtcgcactaattgtcaatttattggctagggagttacattttcggacaagggaaaacgtttgcaccatcaaatttaatctgttggtaccagatctgcttttttg

SEQ ID NO: 53475 - DNA, 311 bp, Glycine max
  unsure at all n locations
  Clone ID: LIB3167-048-P1-K1-A10
gaaaggcnggggggacccacgcagatacgtttaattnttatgaaaaaaagatatttattatttaaagaatagnaaaaaaaaggggagcgcggaaaaataaaagtgcttaaggttaaataaaaaaattaacacaaaaaggagaaagaatataaaagaagattaaatataaatcttactaaagagaaatttaatatttatgaaatttctgaaccaaaatacacaaaagaaaatacaaataaaaatcggtgttgagcctatgctttaaaactataattattttatgtgatcattgaattattacaaaaaattat

SEQ ID NO: 53476 - DNA, 369 bp, Glycine max
  Clone ID: LIB3167-048-P1-K1-A12
gccactcgtgctgccaaacattctaacttttcattcagggacagttaactggacaattgggtaaaaataaaaaatagatgctacacatgttctgtacactccgaagcataccatacgattaggaaattttaaatatgacgggaaacttgatagtgaccacatatcttaatacctaccacataaaatgctatcttgtcttctactgttactgtatcttaacctaaatattgctttacatgtactaccatggacataccggacgctgctcgaacgtcaccaatacgtgctgctgtggtcaaagtgaacaagcatgtattctacagaattttaaggtagaggatttatgtgcgggtagagcattgttatgcc

SEQ ID NO: 53477 - DNA, 329 bp, Glycine max
  Clone ID: LIB3167-048-P1-K1-A2
cccacgcgtccggccacgcgtccggcgtatcagcggtttgatctacgaggagactcgcggtggtttcaagaaatattttggactatgttatccgtgactccgctacttacacggagcacgctaggaggaagaccgatactgctatggacgttggttatgcacttaagaggcactgataggatcatataaggattaggtctttggattaaactcgtagaagatctgtttgaaacaaattgttattttgaaccaaaagtgaagcagattgcatgtgttaaatgttaagccaaaggttacttttcatgttctaattgttctgaactataatc

SEQ ID NO: 53478 - DNA, 362 bp, Glycine max
  Clone ID: LIB3167-048-P1-K1-A3
gacccacgcgtccgactacaattctcgatttaccaccaaaatttgtctttttaggtttcaatctcgctacgggacaagcagaggttctatctcttctctgccaccacgccctttctctcgcttgaggtaaagacctttttgttcaagcatggcagatagcgaagcggtggttacggaagcatctgctgctgaggcatatgcttcggctggttatgctgagaccgggtcgaatcctgctcccgaggcacgtgctactgttgatcaatctgctggagaagctgctcatgccagttcaacttatggttatggttattctaatgttggtcacgtgaattcttatgcttgggatccgaattccatcc

SEQ ID NO: 53479 - DNA, 418 bp, Glycine max
  Clone ID: LIB3167-048-P1-K1-A4
gttgcagcacggtttagtgtaccgtgagcacatcaggtaacctggatactatgaggggcgctgcgggaccatggggaagctgcctatgtttggctgcactgcatgcttatgaggtgtggtaggagcttcaagaggctaagactgcataccccaatggcttgatccgtatcattggatatgacaacggtcgtcaagtgcagggcataagattcatcgtctacaagtccccaggcttttaagtcattggaaaatttgcaacgcatgtgtagccaccccactttgattgttgtacttaaactacattaccatacgatcatgctttatgagatgctatcatactggatgttcggtttatgttcttggactataatggctattaatggatgagcactcttgtatcccatactatgaaaaacat

SEQ ID NO: 53480 - DNA, 378 bp, Glycine max
  Clone ID: LIB3167-048-P1-K1-A5
cccacgcgtccggctcaccggccaagttattgacgtgccgggcgacccgtcctagacggactgtccgctggttgcgggcctgcttgttccgggctccgacgtcaccatgcttaacgtgctgatgaacaccacgcggaccggactcatacggacgctgcaagaaatgggcgccggcatcgaagtcatgaacccgcgccttgccggcggcgaatacgtggcggacctgcgcgttcggtcattcacgctgaagggcgttacggagtcggaagaccgtgcgcgttctatgatcgacgaatatccgatgctcggtgtcgccggcgacttcgacggaggagcgaccgagatgtacggtttgggagaactccgcgtgaaggaaag

SEQ ID NO: 53481 - DNA, 435 bp, Glycine max
  Clone ID: LIB3167-048-P1-K1-A7
cccacgcgtgcgagcgaactagctggttttggagtgggtgctgtgctcctctgcgccacgggtgctgccaccaaagtcgatgctttcttctcttcttctcagcgcagctcattagggatgtgcaagcgatgtggcaatcttaggcgattggcttgctcgacatgcaaaggaactgggtctatcagagaagggggaatacttggtattaaactcgtagaagatttgtttgaaacaattggtaatagtgaaccaaaggtgaagcagatagcatgtgtaaaatgtcaagccaaaggttacttttcatgtcctaattgttctgaactataatcactgtggttttatgttctatacctacaaggatttttgcccaaaacattcaatttcaacatgtaacattgtgaattgttattatagatggtggcatgcagcatgcag

SEQ ID NO: 53482 - DNA, 429 bp, Glycine max
  Clone ID: LIB3167-048-P1-K1-A8
cccacgcgtccgcccacgcgttcggagagagatcacatttactgagctataggctatagccttccataatcttataacaatggaggggaccaccagccaaagcacgtttaccttcatccctagcacaattgagacacctagtccaagcattcctgagatttcatcatcatcaccttcccctggcggctctcttgcaagagttgcacaaagttaccctcctggatttcccagaaaggtatttgcggaggttatagggacatttctgttagtgtttgtggggagtggttctgctgggcttagcaagattgatgaaagcatggtgtcaaagcttggagcttcacttgcaggaggactcatagtgacggtcatgatttactcaattggacacatgtgaggggcacacatgaacccagctgtgccgcttgcttt

SEQ ID NO: 53483 - DNA, 427 bp, Glycine max
  Clone ID: LIB3167-048-P1-K1-A9
ctccccaccatcaaaaacgttctctcccttcacatcctcgtcgactactggggcgcgggaaagctccaccagatcaacaacagcaccaccctcgtctcctccatgttccaggccaccggctccgcctccggcaccgccggctacgtcaacatcaccacccaccccaccaccaccatcacccgccccaccaccattagcagccggtgataatagagttccctcccgagaaacccatcagcaatattgcaactccgggtctcggcaacactgtctacatcaatttctgctcttcctgctcatacaagggaacagcagtgacaatgaagaatatgttggagattgctttacctggaactgaggttattcttgcaaattatcccccatcacttccaaagcgtctgctaagcaaattggttccaagtgttca

SEQ ID NO: 53484 - DNA, 458 bp, Glycine max
  unsure at all n locations
  Clone ID: LIB3167-048-P1-K1-B1
cgcccacgcgtctcgcccacgcgtnccgcccactgcgttcgagttgangaacttaagaagaaggagaatggcgttcctttcaatcgatctcctccccagcttgttacccaccgtcaanccgtnngccggtgccggcantggttgcttccattcaaccggcctcaaatnccatggcttggcttccccacgaggaagaccaacaatgacattacctccattgctagcaacggtggaagagtacaatgcatgcaggtgtggccaccaattggcaagaagaagttcgagactctttcctacttgccagacctcgatgatgcccaattggcaaaggaagtcgaataccttctaaggaaaggatggattccttgcttggaattcgagttggagcacggtttcgtgtaccgtgagcacaacaggtcacctggatactatgatggacgctactggaccatgtggaa

SEQ ID NO: 53485 - DNA, 407 bp, Glycine max
  Clone ID: LIB3167-048-P1-K1-B10
cccacgcgtccggaaattgatgatgatgttgctgatgtggggctctgaatcccaaggccgattactgtctatcccaacaaaacctaacccagatgatgctcctgcctctgctcgttggctcgtctccctcaatttctggggagtcttgaatactatctcatctgatttgggtggagctccctttgggaatgtggtatcatatagtgatggactacctaacgaaagcactggaatcccatacttttacttgacaactctagacccgacagcaagaaatgcactgcaagatgataaagcttcattcacggtcagtgaataccctcttgggacctgtggcaggagagacccaatgaaccctacttgttccaaaatttctctaactggaaagctgaaattggttgatgaaa

SEQ ID NO: 53486 - DNA, 434 bp, Glycine max
  Clone ID: LIB3167-048-P1-K1-B11
gtttaccaggacctccttacaggtgatgagcttctctctgactccttccgttacaaggaaattgagaatggaatgctgtgggaagttgaggggaagtgggttgttaaaggagcagttgatgtagacattggtgcaaacccttctgctgagggtggaggagaacatgagggagttgatgatgcagctgttaaggttgttgacattgttgacacattcagacttcaggagcaacccgcattcgataagaagcagtttgttaccttcatgaagaggtttatcaagaatttgactcccaagctcgatgcagagcaacaggagttgtttaagaagcacatcgagggagcaactaaatacctgctctctaagattaaagatttccaattttttgttggtgagagcatgggtgatgatgcttgcttggtctttgcctacta

SEQ ID NO: 53487 - DNA, 366 bp, Glycine max
  unsure at all n locations
  Clone ID: LIB3167-048-P1-K1-B12
atgcaatgtactggcggagttccatattgaagttcaacaaaaatgaatgttatatacaatatatttgacaatgtatttatggctctacatgcatttcagagcaaacaaaaggtaatagactccttaagaagtgcagacattgcaactcttcatacagcttcctcttactccttccccaccaaccatataaagtggattcttgtcacattcacctactttagcccacctagggcaattctcattctcatcaacacactctccattatccacttgcttgaatggtttttcaaagtcactcacgtgaatccacttggttgcagaccacttctcgccctcaatgactggacagcttncatgcaagctctt

SEQ ID NO: 53488 - DNA, 437 bp, Glycine max
  Clone ID: LIB3167-048-P1-K1-B2
actgaacacacacatagaaacccaacaataggaatgtacaagatgattctaaccctggtgtggagtattaatttatctatgctatacctttaccacacgttcgtggtggatttgtccgtatcatactacacacgcccgaatggccctgcagggtacttatgcatgagcccaagaaaggtcacggaggacgacttattctactccggccttggcaccgtcggcaacacctcaaacataatcaaacccgcggggacccctgcgatcgacactcaatttcgccgcgtcaacgggctgggaatctccattgcacgcctagacctagcatacgctggagtcatacctcttcacacgcaccctggtgccttatagctgctggtggttgggcacggaacaatctgcaccgactttcttgcttgggacaacactgcataccttaa

SEQ ID NO: 53489 - DNA, 438 bp, Glycine max
  Clone ID: LIB3167-048-P1-K1-B3
ctcactcttatcgacaaggaggaagaggtgtcagatgattcagacaagataagacgagggcttggatgaaaggtaatgattataaaagaaaaaaaaccgatgagcagctaaaaagggggaggagtactgcgagtgaacgctgtaatcgtgcacctgaacctgtgcatggatcaaaggaggatggggataaggaggaatctaggattgcacaaccgtctccctgtactgctgatgagtccaaagctcttgtcatagttgagaagactagtgaagtttctgaagagaaaccgattgaggggtctgtgaaccgagatgctgctcttgcaagagttgcaacccagaagaggctggcactaatcaaagtatgggaagaaagtgaaaagtccaaagcagatatcaagtctcacaaaaagctatcagccatttcatgatgggaaa

SEQ ID NO: 53490 - DNA, 343 bp, Glycine max
  Clone ID: LIB3167-048-P1-K1-B4
gccgttcgttctttctttctcccctacacaaaacatggctttgcccaatcagcaaaccgtcgattaccccagcttcaagcttgtcatcgtcggcgacggtggcacaggaaagacaaccttcgtgaagaggcatctcactggtgaattcgagaagaaatatgaaccgaccattggtgtggaggttcatccgttggattttttcacgaactgtggaaagattcgcttctattgttgggatactgctgggcaagagaagtttggtggcctcagagatggatattatatccatgggcaatgtgcgattatcatgtttgatgttactgcccgtctaacatacaaaaat

SEQ ID NO: 53491 - DNA, 374 bp, Glycine max
  Clone ID: LIB3167-048-P1-K1-B5
gttagaaggaagggtgggagcagccgtaagcatgaggtagcgaatcagattgagatgggggcgttcggtaggagaagcatgtacactgtggctaaagcgggggaggaaatcaccgccactggcaacaccaagatccgcaaatgttccagcgagctatgcaccttactcgtgattgctggccaatctcgttccgaaatcgctctcattctctacaaggtcatcaaactctataatttcaagagttcgggcattaagaaggacatgacttgggagcagaatttgtagacactgttgcgtggcagaaacaatgttggttttactgagattgcgaacatactgacttctgaattcgggcgatgtgcgcgatttatgtg

SEQ ID NO: 53492 - DNA, 444 bp, Glycine max
  unsure at all n locations
  Clone ID: LIB3167-048-P1-K1-B6
atcgagataactagaaacagtgtgatgaaaatgaaggtccttgttttcttcgttgctacaattttggtagcatggcaatgccatgcgtacgatatgttccctctccgaatgaacactggctatggtgcccgtactccggaggtgaaatgcgcaagttggaggcttgctgtggaagcacacaacatctttggctttgagaccattcctgaagagtgcgttgaagcaacaaaggaatacatccatggcgaacaatatagatcagactccaaaacagttaaccaacaagcttacttttatgccagagacctcgaagtccatcccaaggacacatttgtgttcagtatagatggcaccgtactctctaatattccatactacaaaaaacatggatatggggtggagaaatntaactcgaccttgtatgatgaatgggttaacaagggc

SEQ ID NO: 53493 - DNA, 65 bp, Glycine max
  Clone ID: LIB3167-048-P1-K1-B7
ttgttttcgtacacaaaccctgtatccaaactgcatcagttttatgaagcattttccgttggatt

SEQ ID NO: 53494 - DNA, 429 bp, Glycine max
  Clone ID: LIB3167-048-P1-K1-B8
gtcttcgcaaccgttagcactccttcttctccttcttcttcttcttcttcggccttcccttctctcattcaagacaggcctgtctttgctgcccctgcccccatcatcaccccaactgtgagagaggatatggcaaaggaatacgagcaagctattgaagaactccagaaattgttgagggagaagagtgaactcaaagccacagctgctgagaaagtggagcagataacagcttctctgggaacatcatcatctgatggcatcccatcatcagaagcctcagacaggatcaaagctggtttcattcacttcaagaaggagaaatatgacaagaatccagctttgtatggtgaacttgccaaaggccagagccccaagtttatggtgtttgcttgctcagactcaagggtgtgcccatctcatgtgcta

SEQ ID NO: 53495 - DNA, 426 bp, Glycine max
  Clone ID: LIB3167-048-P1-K1-B9
cccacgcgtccgtcacatttcaacaaccatagccatggctttctccttctccaaagcacttgtccttgcctgctccttctgcttatttgcgtctttggcttttggacgcgatttctccattgtgggctattcatcggaggacttaaagtccatggataagctcattgaactctttgaatcatggatgtcaaaacatggcaagatttaccaaagcattgaggagaagcttcttaggttcgagattttcaaggataacctaaagcacattgatgagagaaacaaggtggtcagcaactactggcttggcttgaatgagtttgctgatttgagccaccaagagttcaagaacaagtatctggggcttaaggtggactactctcgaaggagagagtctcctgaagaattcacttacaaagatgttgaatt

SEQ ID NO: 53496 - DNA, 253 bp, Glycine max
  Clone ID: LIB3167-048-P1-K1-C1
tgtactcgtgcgtccacgcgtccgactttacgtttgtggacgcgtggcacaagagaggacgtgggcaaggagaggaaaagagtgtttcacattatggaccaataatggcaacaccaaaacagttatatgagctgcaacaacaaccaaatgtgcaatgagtgaggaactcgactatgattaacagcaaccagagaccaatgtgggatgacaaggaagatatgatttcaagatcaattctggcattggttcgtgc

SEQ ID NO: 53497 - DNA, 438 bp, Glycine max
  Clone ID: LIB3167-048-P1-K1-C10
cccacgcgtccgcttggatttaacaagttttatagaggatatgatgattcaaaatatcggatgcctaattctatggatgtgttcaacaggacatttgggatttgagattgttgggtatattggccatggtaaagccaagtcagaaataaacaaacagaatttttctgcattgccaaaggtgatggggatggctcatgacataacctgtctattgggctacgaaaggatgaaactctcgcttatagctgcagctggttactgttcttgattgcagaagcaagctgcgttgagatttaagaaatcaatcatggatcggaaagtatttggcaggtagatcttagttgagtggtttctcttagtacagaacatggaaacctgttgatcgatcgactatcaaataatctctcctattttgttaatgatattttttcttttacc

SEQ ID NO: 53498 - DNA, 440 bp, Glycine max
  Clone ID: LIB3167-048-P1-K1-C11
cccacgcgtccgattatcacttattacaaatatgtctgttaaaacatctcgtgatatgattcacattttacaaaaccactatccagaaaggcttgctattgcttttatgtacaatccaccaagaatattccaggctttctggaaggccatcagattcttcctggatcccaagacagtccagaaggtgaagtttgtttatcctaacaataaggacagtgtggagctgataaaatcactcttccccacggaaaaccttccaagtgaatttggggggaaaacaagtctaaactatgaccatgaagagttctcgcgattgatgaccgaggatgatgtgaaaactgccaagttctggggacttgatgagaagcccttcaaccctcctaagaaggggcattcgggagcagaggtggcaccggaaccagtgcctgttgaggcagtag

SEQ ID NO: 53499 - DNA, 434 bp, Glycine max
  Clone ID: LIB3167-048-P1-K1-C12
cacttcgctggtaataagagaagagaagagagagagagagagagagagggcgtggagaatgttaagtctctcagttgcttctccttcttcttcaaccatttcctttctcccaaagccattcaatggcattcagctccgtcgctctgccacatgctccattccacccacgaaatgcagcgcttcggtgccagtggtgatgatgtctaaaaggacggaggaattgaaggaaattagacaaatgaccaccgaacaaattaacgaagaggttgtcgaccttaaaggcgagcttgtcatgcttcgccttcagaaatcggctcgcaacgagttcaagtccagcgaattcggtcgcatgcgcaagaggattgctcgcatgcttactgtgaagcgggaaagagaaattgaggagggtatcaataagaggttgtccagaaagc

SEQ ID NO: 53500 - DNA, 428 bp, Glycine max
  Clone ID: LIB3167-048-P1-K1-C2
gcgtgacgaaggaacaagttgaattattcttgaaggccaaactgaacccttctcaccttgaagtggttgatatatctggagggtgcggtgcaagttttgtggtagagattgtatccgaacagtttgaaggcaaaaggctacttgagaggcatcgaatggtgaatgctgccttagaggaggaaatgaaacaaattcatgctctctctattaagaaagctgttaccccagagcagtggaaacaacagcaagaatccaaccaatcaaatcctgctgcctagagcatatgttttagttataaaataagaaatccatacagtgtgttgctgactgttgacattgtttgtggattctagttctatgtagttttatcgacactcaaatttacaattgtactactaaattttagtttacaaaatctggcttcccgt

SEQ ID NO: 53501 - DNA, 430 bp, Glycine max
  Clone ID: LIB3167-048-P1-K1-C3
tagacatggccaccgtcacttctgcagccgttgctattccctcattcactggcctcaaggcaagcgcaggcaaagtgagtgccgcagttaaagtctcagctccccaagccacaaggttgggcatcaaggcttcgctgaaagacgttggagtcgctgttgtggccactgccgcgagtgcagtgctggctagcaacgccatggccattgaagtgttgctgggtggtgatgacgggtctctggctttcgttcccaacaatttctccgtggcctctggggagaagatcgtgttcaagaacaacgcaggtttcccccacaacgttgtgttcgacgaggacgagattcctagcggcgtggatgcagggaaaatctccatgagcgatgaagaccttctcaatgcgcctggtgagacttacagcgttactttggatgc

SEQ ID NO: 53502 - DNA, 429 bp, Glycine max
  Clone ID: LIB3167-048-P1-K1-C4
cccacgcgtccgcccacgcgtccgagtgtttttcatttcatcgtgcattcaatggccaccacagcagctctatccggaaccatggtgagcacctccttcatgaggaggcaacctatgaccaccacaagcctaaagacattccccaacgttggtgaagctctttttggtctgaaaagtggacgaggtggtcgtgtcacttgcatggcctcgtacaaggtgaagctcataaccccagaaggagaagtggagtttgaatgcccagatgatgttttcattgttgacaaggcagaggacgaaggcattgaacttccctactcgtgcagggccggttcttgcgtttcctgtgttggcaaaattgtggaaggtaacgtggaccagtcagatggtagcttccttgatgatgagcaaatagatagtggctgggttctc

SEQ ID NO: 53503 - DNA, 336 bp, Glycine max
  Clone ID: LIB3167-048-P1-K1-C5
ctctgctgagacaacaatggcgatggtttttataatggccactactgggatgtgggtgacggatgagtgcaagaactctttcatggaaatgaagtggaagaaggttcatagatacatagtcttcaagatcgatgagaagtcaaggcttgtcaccgttgataaggtgggtggtcccggcgagagctatggtgatctcgccgcctccttgcccgacgatgattgtagatatgccgtattcgactttgatttcctcaccgtcgataactgcccgaagagcaagaatcttcttcatttgcatggtcttcaacagcatcaaggattagagcaaagatgctt

SEQ ID NO: 53504 - DNA, 440 bp, Glycine max
  Clone ID: LIB3167-048-P1-K1-C6
cggatcttgcccctctctcttttcttatagagaccacatttattcattgcattcaaagggcaatggcctcttggaagaagaccatcacaactccattcaaaaaggcttgcactttctttaaccagcaaccaacatctgcaagggatcaaaagaagtctcaaacagagcaagagaggcaagtaatggatctgcacggggaagtgatggcatgtgggtatgaagatgttcaagtgatgtggtctattctggataagtcgaaatccacaaactgcaatataacctcttcaacctgacccaataaaaaaacaagaaagtggcacttcagcaattagcggatgtttttgtatgctaatgtttaaggtcataattgcatcatactaacatatctatttggtatgaatgtaattctcattctcatagtagaaaatgaaaaatgatgt

SEQ ID NO: 53505 - DNA, 393 bp, Glycine max
  Clone ID: LIB3167-048-P1-K1-C7
aaaaaaaaaaaaaaaaaaaattttttatttataaaaaaaaaccattataacacaaaaaacgcgtttatttatattaaaaaatacttttaaaaaaataataataaaaaataaaatctcctcttctttctagtctttatttttatttattacccttcatattcttaattctttctttaatttattaaaccaaactttttttttttctttctttttataatcctctctcctctttccacttcttttctttttttacattccatccttttaattctttcttcctattgcatactttcctattttttttaaaaatccttttcttttttcttttttctaactattttctcattctctttcccttttcttacttctcttctcatttttttctgttacttt

SEQ ID NO: 53506 - DNA, 431 bp, Glycine max
  Clone ID: LIB3167-048-P1-K1-C8
cccacgcgtccggtttatcgtgaggagaatatgaagttgtttgttttctttgttgctgcagtagttttggtagcatggccatgccatggcgcaggctaccaaaggttccctctccgaatgaaaactggctatggtgagcgttcttcggaggtaaaatgcgcaagttttaggcttgctgtggaagcacacaacatccgagcctttaaaaccattcctgaagagtgcgttgaaccaacaaaggactacattaatggcgaacaatttagatcagactctaaaacagttaaccaacaagctttcttttatgctagtgaacgcgaagtccatcacaacgacatatttatattcggcatagataacaccgtactctctaatatcccatactatgaaaaacatggatatggggtggaggaatttaatgaaaccttata

SEQ ID NO: 53507 - DNA, 431 bp, Glycine max
  Clone ID: LIB3167-048-P1-K1-C9
atgacatcaaggatcttaaacccttgaatgatagagtcctcataaaggttgctgaagctgaggaaaaaacctctggcggtttgttgcttacagaggcaaccaaggacaaaccttcgattggaacagtgatagcggttgggccggggcatctggacgaggaaggcaacagaaaacctttgtccgtgactcctgggaacacagttttgtactccaaatatgctggaaatgacttcaagggcaaagatggttctgactatattaccttgagagtctcagatgtcatggctgttctctcctagaacaacttgctttgggttttgtaacttgaaatttttgtgtttatctcgagaaaacgtggattcttttaatcgtaaggacttttgaaaaatagtttattgcaatctgttccgtagacaatctctttttatctt

SEQ ID NO: 53508 - DNA, 436 bp, Glycine max
  Clone ID: LIB3167-048-P1-K1-D1
cccacgcgtccgcttacattctcaagccatgagttgtagaattgtgatctacttcactttcttcttctgtttgttttttacctcggttcctcttgttcatatgtatccctcgtatccctataggtagaaattaccagcttgaccttaatttctatgatagatcatgccccaatttgcataagattgttggatatggtgtttggttagccttaagaaatgacaacagaatggccgcgtccctccttcggttgcactttcacgattgcatagtaaatggctgtgatgcttctgtgcttcttgatgatacaccatatttcacgggcgaaaagaatgctcttcctaatcacaattcacttagggggtttgaagtcattgatgacataaaagaacatcttgaaaggatatgtccatcaacagtttcctgtgctgatatatt

SEQ ID NO: 53509 - DNA, 435 bp, Glycine max
  Clone ID: LIB3167-048-P1-K1-D10
gaaggtagtctagatgttggggctggtcaaactcctcaattgcggttgcctggaatgtatggaagttgaggtcaatggaattactgttaaggacaagtattgtgatacttgcatgctctacaggcctcctagatgttctcactgctcaatttgtaataactgtgtggaacggtttgatcaccattgtccctgggttgggcagtgcattgggctgcgtaattatcgcttcttcttcatgtttgtcttctcaactacactactttgtatatatgtattcgcattttgttgggtctatattagaagaattatggacgcagaggagacaacaatttggaaggcaatgatcaaaaccacagcctgcatagggttaataatatacaccttcgtatcaatgtggttagacggtggcctgactgcctttcatgtatatcttat

SEQ ID NO: 53510 - DNA, 443 bp, Glycine max
  Clone ID: LIB3167-048-P1-K1-D11
attctatcatccagtaaacactatctcaatagtgaagctctaaaccattgtcaagggtggcagtttcttcgtgctctttgagctggatttcaccctgcttatcccataagctaaacttaccacatacaaattgtttgccacgcaacactgcaacttcctcttccaacactgtcttttgtgcattggagacaaaccccagaggagaaatcttctgccagagaagaccgctactgttgggcgttggagcattaactgcaaatttacaaccaataaatttggtctttgctcaagaaaaaccagacagataccgagcttttgtggactatgaagatggatattcttacgtatatcccattgattggaaggaatttgacttcaaggctcatgattctgcattcaaagacagatatctacagttacagaatgtaagggtgagatttata

SEQ ID NO: 53511 - DNA, 327 bp, Glycine max
  Clone ID: LIB3167-048-P1-K1-D12
ggaaggaggagtgggggctaccagatgggtatgaagaaagagtgaaagacagagggatagtgataagagagtgggtggatcagagagagatactgatgcatgagagtgtggaagggttcctgagccactgtgggtggaactcggtgatggagagtgtcacagcaggggttccgatagtggggtggccaataatggcggagcagtttctgaatgcgagaatggtgcaggaggaggcgaaggcttggtcgatagttctcaactacctagctgctgatgagcttgagttggctgttaatgctgtacgtgacaacatgatgaacaggatta

SEQ ID NO: 53512 - DNA, 429 bp, Glycine max
  Clone ID: LIB3167-048-P1-K1-D2
aaaaaaagtcatagtttttttttggggttgtgtgtgtcttttggtggaggaatgcttgtcacgtactcctttaaagttctcccaaaaacacttttgtgagtgagtgagtgagagaaagaagagaaggagttgaagtggttgttgtattgtagtagtgtgtaaagtcttggtgatggatagacacaaatgcaagctttgttcaaggtctttcagcaatggcagagcccttggtgggcacatgaaggctcaccttgcttctctccctctccctctacctccaaagcttcactcttgtttgttttgctctgactcaaaacaagaacaatctttaagggagaatcctaagaaaaccttgtggattctggatcctgaagacagagagagcgagacagagtctaataagaacccggctcgttaacgatccaagcg

SEQ ID NO: 53513 - DNA, 399 bp, Glycine max
  Clone ID: LIB3167-048-P1-K1-D3
cccacgcgttacgggctaagcccaagcccgctgctaaagccaaggacactaaggcaacggagtgaaaggcaccagctaagcccaaggcagctgctaagcctaaagccgaagctccagccaagcccaagcccgtccctaaaccaaaggctgctgctgctgctgcttccaagcccaagcctggtgccgccaagcccaaagggactaagccagctgccaagcccaagcccaagcccgctgctaaaacaaaggctgctgctgccaagcccgcggcaaagcccaaagcgaagcccgccaaggcttcaaggacgtcgacacggacttcaccagggaagaaagcagctcctgctgcgaagccggcagcgaagaaagtagcgcctgctaagaaagcgccagtgaaga

SEQ ID NO: 53514 - DNA, 65 bp, Glycine max
  Clone ID: LIB3167-048-P1-K1-D4
ctagtaatgatctctattccatgctttctacaataaaaaaaaaaaaaaaaaaaaaagggaagggg

SEQ ID NO: 53515 - DNA, 435 bp, Glycine max
  unsure at all n locations
  Clone ID: LIB3167-048-P1-K1-D5
atttaggttacgaggaaattatcatgaatccaattatttctgctgcttctgttattgctgctgggttggccgtagggcttgcttctattggacctggggttggtcaaggcactgctgcagggcaagctgtagaagggattgcacgacaaccggaggcagagggaaaaatacgaggtactttattgcttagtttggcttttatggaagctttaacaatttatggactggttgtagcattagcacttttatttgctaatccttttgtttaatcctaaaaaaatagaaatacatatccttttttccgtggacttgctttaccggtcttgctttttcgaattctatttatattaatatttcactcctataattctttatccgntcggacaagaacacaggggaaggactaattgaaaggtgaagaattcacatactgat

SEQ ID NO: 53516 - DNA, 398 bp, Glycine max
  Clone ID: LIB3167-048-P1-K1-D6
attaacctttctcattccccatctcctcaccttattcagccactgctaatttctagggttccgaaatggacgctggcggaaagatcaagaagggcgccggaggaagaaagggcggcggccctaagaagaagccggtttcaaggtccgtcaaggccggtctccaattccccgtcggaagaattggccgttatttgaagaaaggaaggtacgcccagcgtgtcggtaccggtgctcccgtttacttggccgcagttctcgagtacctagctgctgaggtgcttgagttggctgggaatgctgcacgtgacaacaagaagaacaggattattccgagacatgtgctattggctgtgaggaacgatgaggagttggggaaattgcttgctggtgtcaccatt

SEQ ID NO: 53517 - DNA, 427 bp, Glycine max
  Clone ID: LIB3167-048-P1-K1-D7
cccacgcgtccggcgaaaatgacaaccaccttcgcgaccgtcgcaggactcgggggggcatcactgtcatccacctcatctcgtctcacctcagggtttgtgaaatcgccagtgagtgctaggaatcccttgaggaaagctgtggcaatgggaaatgggagggttacatgcttcgagaggaattggctgcgggcagattacagtgtcattgggtttggattgattggttggctagcaccctcaagcgtaccggctatcaacggtaaaagtctgactggcctcttctttgagagcattggagctgagctagctcacttccccacccctcctgcccttacttcatccttttggttatggctggttacgtggcaccttggcttgttcatctgcctcacttttgggcaaattggattcaagggaaggactg

SEQ ID NO: 53518 - DNA, 273 bp, Glycine max
  Clone ID: LIB3167-048-P1-K1-D8
gggtcgttggagttcccggaggttgcggtggagattgagacgcagttgaatgggtgctaagaaggatgtggatgaggtgaacaagaggactggtgggactcatggcgcggagtttgatgggacggatttgatcgggaacacgaagcatttgatgaacgctgtgaattctctgcctgagttgactgagaggaagcaggtgatcgataagcacaccaacattgcgaccgtgtttttgtgcgagatcaaggagaggtcttttgattcttatgctaa

SEQ ID NO: 53519 - DNA, 434 bp, Glycine max
  Clone ID: LIB3167-048-P1-K1-D9
cccacgcgtccgaattttccttctggagagttgatgtttcaacgcctggagttcgggggagctgcaaatatggtgcagactgaagctttgctaaaagatgaacagatgcctaccaaattggttagtgagacagggaagaagaaaaacaatgcattttccaaatttaggaaaagagcatcttggagagacagtgttggagcaagcaggcagttgactggctatcatggctatgcagctagttcttatcatacacggattatttcagcgattcatgctaatatcttctcacatggaaaatggggcatcaagtgggaaaatggtaaaagctgcaataataggtcttggagcaagtgtacttcccacgtgtcttcacggatgtatccccttgttggaaattgagactgtggagttagaccccatgattgttgatattg

SEQ ID NO: 53520 - DNA, 293 bp, Glycine max
  Clone ID: LIB3167-048-P1-K1-E1
gggaaggggtgcctcaactggttatgacaatgcttttgctttgcctgctggtggcagaggagaggaagaggaacttgctaaagaaaacaacaagagtgcttcttcttccaagggcaaaatcaccttgagtgtcaccaagaccaagcctgagactggtgaggttattggggtcttcgagagtgttcagtctattgatactgatttgggggctaaagctcctatggatgtttagatccatggcatctggtatgctcagcttgacttatagacccttttttttattgctgtatttc

SEQ ID NO: 53521 - DNA, 432 bp, Glycine max
  unsure at all n locations
  Clone ID: LIB3167-048-P1-K1-E10
cccacgcgtccggaagaatcagatacagtataaacttcataaaaatcatacaggcaataacagtataaacatgggatctgtaggggcaagtgacatcaaggcaatcgcggcagatgcttcagttttttcctttggagatgaagattttgaaagtgactgagaggatgtgggatgacttttgattgatttcaatacttttcaggaaaggcattaggcattagggaattcattggttttcccccaatttgttgtcaaaagaactttctgtattttattatttaaactctgtatattttaagggttacatgtttacatgattctctcaagtattctacgtgnaaaaaaaaaaaataaataacattttcaatacatattataaatatttnntattttattttaaaaaatttcttaatttcggggctctcgcttgtt

SEQ ID NO: 53522 - DNA, 442 bp, Glycine max
  Clone ID: LIB3167-048-P1-K1-E11
gcgactgcgcttcacgatgggtgcttacaagtatgtttcggagctatggcgcaagaagcagtctgatgttatgagattcttgcagcgggtgaggtgctgggagtaccgccagcaaccttctattgtccgtttgacaaggtctactcgcccagacaaggctcgccgcttgggtttcaaggctaagcagggttatgtgatttaccgtgttcgtgtacgaaggggtggccggaagagaccagttccaaaaggtattgtttatggtaagcccaccaaccaaggtgttactcaactgaaatttcagcgcagcaagaggtctgttgccgaggagcgagctggaaggaagttgggtggcctcagggttctcaattcatactgggtgaatgaggactcgacttacaaatatttcgaggtcattctggtggatgttgcccacagcgctgtt

SEQ ID NO: 53523 - DNA, 433 bp, Glycine max
  Clone ID: LIB3167-048-P1-K1-E12
cttcggtgagagttagagagagagaagaaggcttttttcttctttttttttgcttggttgatggattctcttgttcttttttgtaggtactgaggaagaaagaccaagactttattcgtgtgcttcacttagctcaagagcgtacaattcaggcaaaggccttgaagtcggagtgtgttaaggtttattaggagcagctgctgtcttgactgaagaaatggaggataaccttagctgctcaggctctaatatacccctgccggagtttatacaacaatcatgggcctgtaagtaacgaggcatgatgagactaagcagctatgacctggcacggactgtatgtaacagttgacgaatggacaggtatgacgctcccaacaagttttggcggatgatcaagacactatgaaaagtccgaatagtttgtatactc

SEQ ID NO: 53524 - DNA, 234 bp, Glycine max
  Clone ID: LIB3167-048-P1-K1-E2
gactgaattcaaaccaacggggggccataccctagaatccatttcatgctttcctcctatgcaccagttatctctgctgagaaggcctaccatgaacagctctcagtggcagaaattaccaacagtgcttttgagccatcgtccatgatggccaagtgtgatcctcgtcacggaaagtacatggcgtgttgcctgatgtaccgtggtgatggtgtgcccaaagatgtaaacgct

SEQ ID NO: 53525 - DNA, 294 bp, Glycine max
  Clone ID: LIB3167-048-P1-K1-E3
ggaggactaggtggaggagggggaggaggcagtgtctgccgcggtggaatacgcggcgggtgtggtcatggaggaggctttggttcatttccccctatacaacatttatgtttgctcagaatacctaccatgaacagctctcagtggcagaaattaccaacagtgcttttgagccatcgttcatgattgccaagtgtgatccttctcactgaaagtacatggcttgttgcctgatgtaccgtggtgattttgtgcccaaatatgtaaactctattgttgtcaccattaatacca

SEQ ID NO: 53526 - DNA, 444 bp, Glycine max
  Clone ID: LIB3167-048-P1-K1-E4
gctgactctagcagatctttcaagaatggcacaaattaacaacatggcacaagggatacaaacccttaatcccaattccaatttccataaaccccaagttcctaaatcttcaagttttcttgtttttggatctaaaaaaactgaaaaattcagcaaattctatgttggttttgaaaaaagattcaatttttatgcaaaagttttgttcctttaggatttcagcatcagtggctacagcctgcatgcttcacggtgcaagcagccggcccgcaaccgcccgcaaatcctctggcctttccggaaccgtccgcattcccggcgacaagtcgatctcccaccggtccttcatgttcggcggtctcgcgagcggtgaaacgcgcatcaccggccttctggaaggcgaggacgtcatcaatacgggcaaggccatgcaggccatgggcg

SEQ ID NO: 53527 - DNA, 446 bp, Glycine max
  Clone ID: LIB3167-048-P1-K1-E6
cccacgcgtccgcgcctagtcgattggaattgagaaaattttgtccccgttgttgcaaacatacaattcacgcagaaataaagaaatagatcaaattgatcgcttgtgtgttacccttcgaaccaaagaacttaacatgtaaaatgatctatttttcttatctatatagatagatctatctgtattctatcatttacagttgaatatatacaaatatcagtatataacaacatatattaaaaaaataacaacatatattaaaaaagtcagaataaaaaaacaaatcctttatagtatttcttgtaataaatgtgatttttggaatagggataaataaaccatggaaaaatctaagcgactctttatgaaatccaagcgatcttttcgtaggcgtttgcccccgatccaatcgggggaccgaattgattataaaaacatgggtttaa

SEQ ID NO: 53528 - DNA, 433 bp, Glycine max
  Clone ID: LIB3167-048-P1-K1-E7
atcactctgcagccattgatgtgcctgttttctgaagttgatagattggcagcaatggcagggaagtataaagtacatttagtgatgggtgtgatagagagggatggctacacactttattgcaccgttctgttctttgattcccagggtcattacctaggaaagcacaggaaaatcatgccaactgcattggagcgggttatctggggattcggggatggatctaccattccagtgtttgaaactcccgttggaaaaataggtgctgccatttgttgggagaacagaatgccactgttaaggacagcaatgtatgccaaaggtgtggagatatattgtgctccaacagctgattccagggatgtttggcaagcatcaatgacccatattgcacttgaaggtggatgttttgttttgtcagcaaaccagtttt

SEQ ID NO: 53529 - DNA, 415 bp, Glycine max
  Clone ID: LIB3167-048-P1-K1-E8
gggagggaagaatagaatgggatctggttgtggaaaacacactggagagttcttcaggagaagggatgcatggaggaagcatccgatgctcaccaatcagctccgccacgccacccctggccttggcatcgccgtcgtcgccttcggtatctacctcgtcggcgaacaagtctacaataggctctatgctcccgatcctcattcgatttctcacgtgaaagccggggatcaccactaaacgtttggacggacgcactccattccatcatcacttaataagcttgctagcatgttctcgcagcctttaatgtttaaatttcagaccgtgttcgcttctttggcactcactatgttgtcttgtatgcctacattttatgccttcaatttgcattcacaatgaaactcaatttacttt

SEQ ID NO: 53530 - DNA, 419 bp, Glycine max
  Clone ID: LIB3167-048-P1-K1-E9
atttttgttggaagcagaagccatggaaaccaacacactcccaaaccagcaggcaccaaaaaccaaaaggcaaatcttcatactctcaggtcaaagcaacatggccggtcgtggcggggttatcagggacgctaacaaccgtaagcggtgggacggcgtggttccgccggagagccgctccgatccatccatcctccgcctatccgccaccctccaatgggaacccgcgaacgagcccctccacgtcgacattgactccagaaaggcttgcggcgtgggccccggcatggtcttcgcgaacgcgctgctgcggcggcgcgtggtggtgggcgagctgggtctggtcccctgcgccgtgggcggcaccgacatgaaagagtgggcgcgtggggaggaactgtacgagaacatggtgtaga

SEQ ID NO: 53531 - DNA, 435 bp, Glycine max
  Clone ID: LIB3167-048-P1-K1-F1
cccacgcgtccgcccacgcgtccgctgcaagtccttcgtctcccagaatcggtcactgaatgcgcaatcatgaagctcgataccaccggtctcgaatcggttgccacactgattgcgcctgaaaacgacgttgttggagaactctccgccgctccatccttcgaccttccgaattccaacgatttcgatgggtttgcgaaagaagctattcagatggtgaagcccgcgaagggtactacgactcttgcttttatatttaaggagggtgttatggtagctgctgattctcgagctagcatgggaggatatatatcatcgcagcctgtgaagaagattattgaaattaatgcgtatatgcttgagacaatggctggaggtgctgctgattgctagttatggcacacgaatcatgagatcaagtgtcgtttgcacgag

SEQ ID NO: 53532 - DNA, 378 bp, Glycine max
  unsure at all n locations
  Clone ID: LIB3167-048-P1-K1-F10
cccacgcgtccgcccacgcgtccgattgaatcctgtgcatacatcctcacttatcctcttcctgcgactctcttctcattggttctccgtattctccctcaatcctattaaccttttcttctttcatttcccaccccattctataatcaatcaatggcaatggcttcttcaatccctaatgcgccttctgcgttcaattctcagagctacgttggtctcagagcgccactgaggaccttcaacttttcttctcctcaagctgccaaaattcctcgctcccaacgccttttcgtcgtcagagcctccgattcggagttcgaagccgccgttgtcgccggtaaggttccgccggcgcctnccgtgcccgccagaccggcg

SEQ ID NO: 53533 - DNA, 298 bp, Glycine max
  Clone ID: LIB3167-048-P1-K1-F11
cacgaacagttttcctgatccatggtagaggacgacaacatattttaaaaacaatggcaaacgcctttatatgtaagaatccagaaaatcttgatcgttatgtggaaatgtatagatgcatatgtcataaaggcttgaaataccaaatttcttaatcagatgattgatgaacctatcccctataatggggttacaatcgatcgtaagtggttgtatctgctataaattcaacttataacaatatataaagcttgcaacatacgcggctgaaaaaaaaaaaaataaaaggtgaaaatgg

SEQ ID NO: 53534 - DNA, 353 bp, Glycine max
  Clone ID: LIB3167-048-P1-K1-F12
gccaaacatggctctaatagcttcactctactccacaactgcacaactcacttccgtaccttccctccctgcttcctcctctacactttctcgcaaattttcgctcactttccgggaaaaaaacagaactccaatcacacctcacaagctccctttttcagcaaggcctaccaccaccagagtggtgttggtgaagtcttaggccacaggacctgcttcttctgaggctgcggcagtgacacctgtgtcttctgcgatggatgcatgggtctatggggaatatggtggtgtcgaggttcagacgctgaacttcatagcacctgtggcatgtgtcgatggagcacaggttctaa

SEQ ID NO: 53535 - DNA, 436 bp, Glycine max
  unsure at all n locations
  Clone ID: LIB3167-048-P1-K1-F2
cccacgcgtccgcccacgcgtccgagggaagaagaggttttcgtttggttaagcacggtggatttggaagcagagaaagagcatgaagctgcatttgcagtggcctcactctccctctctctccccaccattttccccttcgtccaacccaagaatatcccatcaaccacccttcaaccaaccaagctcaaagtcccaacccaagcctcatccctcacacacctttctctctccaccaccactcctnctccttccaaaacctccttcaaatccaccgtctccgccaaccccctccacgcccctctctccctcgctccccaccgcccccgcgaccctttcaacgccgtcgntctccgtcgcgccgccgtcgtctggttccgcaacgacctccgcctnctcgacaatgagtgcctcaccgncgncaacaacgactccc

SEQ ID NO: 53536 - DNA, 373 bp, Glycine max
  Clone ID: LIB3167-048-P1-K1-F3
ccgaaggtgtcccattaggggtccaatgtttttgtatttcattagtctcaatttacttatttttgttgacatagtaattgtttaacttgtcagttcataaataacattatcgttatatgctcatgctcttgttcccgtttgaagatttaaaaaaaaaaaaaaaacaataaaattaaaaaaaaaaatattaaagtttaaaaaaaagtttaaatacttaactcacctttctctctacaacaaacacttcttcttatttcaaaataaaatttaaaatattaaatattaatttaaaaaaaaggggggcccgttttgaggtatcaaagttttcgaccccgggattggatcataatattttttttttgggggccccaaa

SEQ ID NO: 53537 - DNA, 446 bp, Glycine max
  Clone ID: LIB3167-048-P1-K1-F5
cacaaatttctccatagttatgggcacttccattctcgacgccctgaacgttcgcgtggaaggttccggcgacaagtaccttgtcctggcccacggcttcggcacggaccaatccgcgtggcagcgcgtgctcccttacttcacccgcaactacagcgtcattctctacgacctcgtctgcgccggcagcgtcaaccccgaccacttcgactaccgccgttataccaccctcgacgcctacgtcgacgacctcctcaacatcctcgacgccctccgcgtcccccgctgcgcctacgtcggccactccatctccgccatgatcggcatgctcgccttcatccgccgcccggacctcttctccaaactcatcctcatcggcgcctcccctagattcctgaacgacaaggactaccacgggggatttgagcagggagaaatcgagcagg

SEQ ID NO: 53538 - DNA, 363 bp, Glycine max
  Clone ID: LIB3167-048-P1-K1-F6
ggtgaaagaacgaacggacggagggtgttgacagattaaaaaggttcaacattgcttgctggcgactataaaaattggggtgactaggattaatgcatgctgcacatatatggcgagaggttgcacatggacattatggatgggcaaaaagaaccggatggaacgtattggagcttcaaagattgcaagcgcgtgaatgcacacaaagggatatttggttgggtaccttatggttacaaaacctgtcgattatgtacagcccttggactaagctaacgcttgtggttctacatttaatgtggtggcatcacatgataactgggacggacttattcatagaaataaggcacatggcgtgactcc

SEQ ID NO: 53539 - DNA, 432 bp, Glycine max
  Clone ID: LIB3167-048-P1-K1-F7
aactttttctctctgggttttttaactcctatggaagaagagagccgtggaggtgtgtttttatcagatgaactctcaaggtccaaagaagctggaagtgtggaaaaatcctctgtttgattagaagaacactccaatcttaggaggagaaagaatgtgagcaagggagacattgctaatgttcccatggaatctgagccagcagcaatttggccgggatacttgtctgcttctgttctcccattcgtgctacacttgggattcatggtgtcaactcgtttcttgtctgccagccctcctctttattggtttgcttcatatataatggcgaatctttattggtttgcttcatatataatggcgaatcctgcaaaatactttagatggggatacgtgatatgggcatactctatggcatacatttttcttggc

SEQ ID NO: 53540 - DNA, 346 bp, Glycine max
  Clone ID: LIB3167-048-P1-K1-F8
gctacggtgaacttttgggtggcgtcgttcttgcatgagttcgaatgggtaccgtctgatgagaagggtgttgatctgacggaggtgctgaagctctctagtgaaatggctaaccctctcaccgtcaaagtgcgccccaggcgtggataagagagagttgaagcttttattaaaaagggaacaagaaaaaaagaaaatgaaatatatagaaataaaacagacaagaaagtaaagtaaagattatgcatgttgctgcatgtaggttggtggttggtggcaggtgtgcagccacacaatggtgatatggtggaagggatgggttaggctctctttttttcgtttaggg

SEQ ID NO: 53541 - DNA, 435 bp, Glycine max
  Clone ID: LIB3167-048-P1-K1-F9
aacaagtagttgagaactaagaaggagaagcaaatggcttcctcaatgatctcttccccagctgttaccactgtcaaccgtgccggtgccggcatggttgctccattcactggcctcaagtccatggctggcttccccaccagaaagaccaacaatgacattacctccattgctagcaacggtggaagagtgcaatgcatgcaggtgtggccaccagttggcaagaagaagtttgagactctttcctacctgccagaccttgatgatgcacaattggcaaaggaagtagaataccttcttaggaagggatggattccttgcttggaattcgagttggagcacggtttcgtgtaccgtgagcacaacaggtcaccaggatactacgatggacgctactggaccatgtggaagctgcctatgtttggttgcactgat

SEQ ID NO: 53542 - DNA, 280 bp, Glycine max
  Clone ID: LIB3167-048-P1-K1-G1
tttgtttcccctagcaacctacttcttacgcctctccgcttcttatctccagattgctggggcggaagcacaaccgttgactagtctcaagcttaactctcatattcttcaggagtctactgctaaagagattaatgaaaatcccgaggcaggatgggaggctgctataaatcctcgtttctccaattatacacgtgaacaatttaagcgccttcttggagttaaaccaatgcctaagaaggaacttagaagtacacctgctatatcttacccaaagacg

SEQ ID NO: 53543 - DNA, 449 bp, Glycine max
  Clone ID: LIB3167-048-P1-K1-G10
cagacgacaaagtgcagcattgctttgcttcgttgttgatccattttggagagagaaacactttcaactctctctctctctctctaagatggtcgacgatccaatgctcaggtcgtcgcttcccgcacctcgagtcgctcaagccgcaatgttcagcttgattcccgaggattggggcgaacatgttagtccctgggtcaaagagatttctcagtacttcgattgcctcaagagcctccacttccgccgcatgattgtcaaggattccgatcttcagaatctcgctcgtgaccgtggtcacgtgcttcatgctctcaagcttgacaagtgcttcagtttcaccactgatggtcttttccatatcggtcgcttttgcaatgataagctgggtttaagccttgaactagattcctttgctacgggagtgatgatatcaacaacagatcttg

SEQ ID NO: 53544 - DNA, 444 bp, Glycine max
  unsure at all n locations
  Clone ID: LIB3167-048-P1-K1-G11
gaagaagagagaggtctctcaacaatggccactgccactgtttcaatttcaactttgtgcgctactttcggaacccattgcgccatttcccacaacccaaaacctctattttctcaacctttcaatctcaatcactttccttctaactcttacaagctcgctttctcgcctcgctcacctctttcaccccttcccaaggcctctgaatccgcggtagccgaaaccgaacccggttcggccgagcccgaaccggcccaaatttccccggcccaacctccctcctgggaacccggtctcttcgctgtcgtaatgattggcggacgccaatatattgttcacccggngcgacatcttactgttcagaggttaaaaggtgctaatgttaatgataagattgccttacacaaggttttactggttggcactgatacatctngctacatt

SEQ ID NO: 53545 - DNA, 407 bp, Glycine max
  Clone ID: LIB3167-048-P1-K1-G12
cccacgcgtccgcccacgcgttcgaagaccggcatggctaatgaagaggggcagaaggaccacctattcggcatcaaagatctcggtcacaagactctccttcagagtgatgcactctatcagtatatacttgaaaccagcgtctatccaagagagcacgagtgcttgaaagagatacgcacgatgactgcaaaacacccactgaacatcatggcaacaccagcagacgaaggacaacttctgagcatgcttgttaagctcacgaattcaaagaacgccttgcaaattggtgtattcactggatactatttgatctccactggcctggctcttccccctgatggaaagatcttggctttggatgtgaatcgcgcatactatgagttaggactgccaataatttaaaa

SEQ ID NO: 53546 - DNA, 430 bp, Glycine max
  Clone ID: LIB3167-048-P1-K1-G2
cccacgcgtccgtgcaaatggcttccgttgttgcaagcttgccgccaccattgctgctccctgctagaaaatcacatatgggcaacttcccaagttcccctgtttctcttctttcagggagatggaatcgtgtttcttttgttgtgaaggcttctggagaaagttctgaatcttcaactacccttactgtttttaagtctgttcagaatatttgggatcaacctgaggaccgactgggacttattggtttgggatttgcagccgtagcagcgttttgggcatcaacaaatttgattgcggccattgacaaattgccacttttcccaactgtactggaattagttggaatattttactccgtgtggtttacttatcgctatctcatatttaagcctgaccggtaagcatggaagagctttttcaaattttg

SEQ ID NO: 53547 - DNA, 441 bp, Glycine max
  unsure at all n locations
  Clone ID: LIB3167-048-P1-K1-G3
cccacgcgtncgcaccaactcttgccccttcagtgaaatcaccatcttaccctccagggccagtgaccacaccaacagttccaacacccactgttaaggtaccccctccccctcagtctccagtagttaagccaccaacaccaacagttccaccacccactgttaaggtaccccctccccctcagtctccagtagtaaagccaccaactccaacaccaacttccccagtggtgtaccctcctcctgttgctccatcttcaccagctcctgtagtgaaatcaaacaaggattgcattccactatgtgattataggtgctcattacactcaaggaagaaattgtgcatgagagcatgcataacctgttgtgaccgatgcaaatgtgttcctcctggaacttatggtaacagggaaaagtgtggcaagtgctacactgacatgc

SEQ ID NO: 53548 - DNA, 447 bp, Glycine max
  Clone ID: LIB3167-048-P1-K1-G4
aaaattcccaatgaaactgctaagcatgcaaatggtgaacatcaagcagaagaaaatagtaatgacctcatatgggctgatccaggttcatgctgttatgcactgtatgcaaagttgaaccctgatacagttctcttgcatcaatcacctttggcccttgcgaaagctttaaagaactcggtggaattggacgggttaaagaaggcacatattcgggatggtgcagcggtcgtgcagtatcttgtctggctggataagaagatgcaggatattttgggagcttctggttactttttggagaacgattctgtgaaaaaggagaaacatttgcagtctttgaaattgactgaggtgactgtaagtgaccagcttgaaagttttcgagcatcaaaagagcatttcagaggattgagtttccccactaattcttcagttggcccaaatgca

SEQ ID NO: 53549 - DNA, 371 bp, Glycine max
  Clone ID: LIB3167-048-P1-K1-G5
ggttgccaaaacttgcagctggggacttgccatctttcttgaacaaatatgggtcctatccaggctactttgatgtagttgtgaatcaatttgtcaacattgataaagcagattgggttcttgcaaacagtttttatgaactggagcagggggttgtggattggctggtgaagatttggccattaaagccaataggaccatgcctgccatctatctacttggacaaaagactccaagatgacaaggactatggtgttaacatgtataatccaaactcagaagcttgcatcaaatggcttgatgaaaaaccaaaagggtcagttgtgtatgtctctttcgggagcatggcagggcttaatgaggagcaaact

SEQ ID NO: 53550 - DNA, 482 bp, Glycine max
  unsure at all n locations
  Clone ID: LIB3167-048-P1-K1-G6
ntccgccctacgccgtccgctccaccgcgtctcggggtatgggagtaaaggtgaagggtgctnnttcggcgacctggctcgaggacacactacggggtgtcactcacgggnngccagttnctgtttctgaccgctttctggnngtgcgannagctcanntagaatcnncgctggctttcctcctacctgcnnatcaccacgtggcgttctctcatacgctcgctttcctacggttggcttctgcctcgacanctcggcttctatcttcctacccgcgcgaaatggctgtngagcagggcgcaacatcaatctacccaagcgcgtttccaattctcgtcatatgtgcgacgccgacaaccggcttacggcaatgccattgaacctnncaagcgaaccgtcaaggggtttcatttgccgccggtnttcgcagggaatcattctggaaagaccaagattgccgccgaaaagcgtggtgggcacac

SEQ ID NO: 53551 - DNA, 421 bp, Glycine max
  Clone ID: LIB3167-048-P1-K1-G7
aaatgaaggtccttgttttcttcgttgttacaattttggtagcatggcaatgccatgcgtacgatatgttccctctccgaatgaacactggctatggtgcccgtactccggaggtgaaatgcgcaagttggaggcttgctgtggaagcacacaacatctttggctttgagaccattcctgaagagtgcgttgaagcaacaaaggaatacatccatggcgaacaatatagatcagactccaaaacagttaaccaacaagcttacttttatgccagagacctcgaagtccatcccaaggacacatttgtgttcagtatagatggcaccggactctctaatattccatactacaaaaaacatggatatggggtggagaaatttaactcgaccttgtatgatgtatgggttaacaagggcaatgc

SEQ ID NO: 53552 - DNA, 114 bp, Glycine max
  Clone ID: LIB3167-048-P1-K1-G8
gcagtttggttatgcatttgaaacttacttttgcttaaacaagtaaaattgatgatacattggactgctcctttggaaagtgtataggccacttttgctatgttttttacattc

SEQ ID NO: 53553 - DNA, 440 bp, Glycine max
  Clone ID: LIB3167-048-P1-K1-G9
cccacgcgtccgcccacgcgtccgatcttctcctcactgaatctaaaaaccgggccggctcttctcacccccacactcccatctcacacacccctcgcatccaacaatgtctctcaccattccctccaacctctccaagcccgccgccctccgccccaaactaagcccaaagctaaggtccgccgccacaaccaccatcgtctgcagcaccaccaacaacaacaacaacaacaacgtgtcctccgacctgaaggcgttctccgccgcgctggccctctcctccatcctcctctccgcccctctccccgccggcgccgacatctcggggctcaccccatgcaaggagtcgaagcagttcgcgaagcgtgagaagcagtcgataaagaagctggagtcgtcgctgaagctctacgaggcgggcagcgcccccgcactggcca

SEQ ID NO: 53554 - DNA, 454 bp, Glycine max
  Clone ID: LIB3167-048-P1-K1-H1
gttcggaaaacccggcggagtggaagaatcactcgcttatccatttccacaccacacatgttctcaaccaacgctctctcttcagcctcgattcgacgctctcccaaccgccagtctctgacccgaagagcgaaccataatggaagagtaaattaccggaaaccgaataaccgtttctccgtgaaagcctccgccaaagagattgcctttgaccagcattcccgctctgctatgcaggccggcattgacaagctcgccgacgctgttgggctcactcttgggcccagagggaggaatgttgtgttggatgagtttggaagtcctaaagtggtcaacgatggtgtcaccattgctcgcgcaatcgagcttcccgatcctatggagaatgctggtgcagctcttatcagagaggttgctagcaagactaacgactctgcgggtgatgggactacca

SEQ ID NO: 53555 - DNA, 321 bp, Glycine max
  Clone ID: LIB3167-048-P1-K1-H10
cccacgcgttcgagacagctttcgtttttgcgactaatagctacagcagcgggccggagtccttacttatcggacaaaatgactcttggcataaaacacctttagaaagccaagatcaagaagaaggtctcgaagaaagagagtggttcttcttcatctttggcgcctgatatttctgcaatgggtgtcttaacacgggtgtggttaggatggaggaaggtgaatagcttccttgtgatccttctgattacaatattgtatatgcctttcacattgtatcgccatgtttgaggattggtattctacttgactctttgtgtt

SEQ ID NO: 53556 - DNA, 440 bp, Glycine max
  Clone ID: LIB3167-048-P1-K1-H11
gtgaagagttggttgaagcttccgctatcctcatatggattgcttcagcccttcatgctgctgttaactttggacagtatccatatggaggtttaatcctaaacaggccaactattagcaggagattcatgcctgaaaaggggtctcctgaatatgatgcgttggctaagaaccctgagaaggagtttttgaagactattactggcaagaaggagaccctcattgaccttacagttatagaaatcttgtcaaggcacgcatctgatgagttctaccttgggcagagagatggtggtgactactggacttctgatgccggtccattagaggcatttaagaggtttggaaagaagcttgaagagattgaaaagaagcttatagagaagaacaaagatgagacattgagaaaccgctatgggccagctaaaatgccttacact

SEQ ID NO: 53557 - DNA, 418 bp, Glycine max
  Clone ID: LIB3167-048-P1-K1-H12
cccacgcgtccgcttttcttcccttctttccagaacaacaccacaacacaaacagagcaaaaaaagctccaccaatggcgggttacagagccgacgacgactacgactacctcttcaaggtggtcctgatcggcgattccggcgtgggcaagtccaacctcctctctcgcttcaccaagaacgagttcaacttggagtccaagtccaccattggcgtcgagttcgccacccgcaccttgaacgtcgattccaaagtcatcaaggcccagatctgggacaccgcaggccaagaaaggtatcgtgccatcaccagtgcatactatcgtggggcagtcggtgcacttctcgtgtatgatgtcactcgccatgcaacatttgaaaatgttgacagatggctgaaagaattgcggaaccacac

SEQ ID NO: 53558 - DNA, 430 bp, Glycine max
  Clone ID: LIB3167-048-P1-K1-H2
ctcaaatctttacaatcgataaccacacccatcgcctttattcagaatgtcggaatcggcatgcagaccacgagaaaagcttgctgagaagcaaaaatattttcagagtatccacaggcatacctacttgaagggacccatggataagattacatccgtggccataccactggctttggctgcaacgtcaatttacatgattggacgagggatctataatatgtcgcatggaattggaaagaaagaataacctgggaatttctgattgaggagggtttcccacacaaacctaccttagcttcgttaatatgggccagtggttttctttgcatttatgtctgttctcttaataaattgcttaattgcagattttgactgccattgggggtttataacttgaatgaaagttgttctttgtatgtttgatata

SEQ ID NO: 53559 - DNA, 442 bp, Glycine max
  Clone ID: LIB3167-048-P1-K1-H3
ggggttgagagcaaagaaagagaagtgatggtggcaaaaccagttgcagtgggtgtcagtgatttgcttctgaggctgttggccttcacagtcactcttgtcgctgctatagtcattgcggtcgataagcagaccaagtttgttcccattcagctttcagattccttaccacctttggatgttcctctcactgctaagtggcatcaaatgtctgccattgtgtactttctggtgaccaatgcaatagcatgcacgtatgcagtcctgtctctactccttgccctcgtgaatagaggtaaaagcaaaggcttgtggacattgatcgctgtcctcgacgcattcatggtggctttgctcttttccggcaacggagccgccgcggcagttggtgtccttggctacaaaggaaactctcatgtgaattggaacaaggtgtgcaatg

SEQ ID NO: 53560 - DNA, 430 bp, Glycine max
  Clone ID: LIB3167-048-P1-K1-H4
gctggtagtgacttttcagacaaagttttgaagtcaagaatgcctgcaaagtttcatcaaccatcctcttctgaacctgtgaaagagcagtgtccagtaatatgcccgattgagctacggcaggaattgaggccaaaaagggcagatccatctggccatacttcagatgacaataatatagttactgttcccactgcaaaaggagggatgaggaggaagcatcatcgtgcatggactcttgttgaggtgattaaattggtggaaggtgtgtcacggtgtggagcagggaggtggtctgaaatcaaacggctctcctttgcatcatactcatatcgtacctctgttgatcttaaagacaagtggaggaatttgctcaaagctagctttgcactggcacctgcagatgaagggataaattcgcggaagcatg

SEQ ID NO: 53561 - DNA, 441 bp, Glycine max
  Clone ID: LIB3167-048-P1-K1-H5
cagactcagaaaagagaagaaacaaaacaaaaaagagcagagagagagaggaaccatgaccaaccctaatttcttagctaaaccctattcgtttagcatttcctctcttttctcccactcgtaaatcctctcccaaacttttcagatccaaataaatcatggttttctgggtttttggctacggttcactggtgtggaaccctggattcgattacaatgagaagattataggtttcattaaggactacagacgcgtgtttgatttagcgtgcattgatcaccggggaacacctgaaaacccagcaagaacttgcacgttggaggagaaggaaggggctatttgctggggagctgcttattgtgttcgaggaggccctgaaaaggaaaaactggctatgcagtatttggagcgacgggaatgtgaatatgacagaaagactc

SEQ ID NO: 53562 - DNA, 295 bp, Glycine max
  Clone ID: LIB3167-048-P1-K1-H6
actcagaaaagagaaaaaacaaattttaatttatcaaacacagacacaaaccatcaccccgccctattttcttacctaaaccctattcatttatcattttatctcttttatcccactcctaaatactctcccaaacttttcatatccaaataaatcatcctttacttcgttttttccttcccctcacttccatttaacccataatttcattacaatcacaaaattataccttttcattaaatactacatactcatttttttttaatcctgcaactttcacctcttaacaccttaa

SEQ ID NO: 53563 - DNA, 101 bp, Glycine max
  Clone ID: LIB3167-048-P1-K1-H7
cccacgcgtccggttaattaacaaaaacataagctattattcttgtaaagtgtgacaggtttagcccatataagtatgaatctttgatttcgttgcttctt

SEQ ID NO: 53564 - DNA, 438 bp, Glycine max
  Clone ID: LIB3167-048-P1-K1-H8
aaaacatgggtggtggtccccacgttatgtctgggcctaatgtggggcccatgagcgtgcctatgcccaacattcccgccgttcaagggcttccggccggccccgtcaacggcggtgggttcttccaaggcgcaggtccggatgcgatgcccggtaaccctttccagcagcagcagcagcagcaacaacaacaacagttacagcaacagtacatggctgctgcgatgatgaaccaacaacgcgcaatgggtaacgacagattccagccaatgatgtacgcgcggccccctcctgccgtcaattatatgtatcctccttacccttatcctcctccagacccttacacccactttttcagcgatgaaaacacctcaagctgcaatgttatgtgatcgatggtggcggtgcgagcttctgatttcagatcttctaatatta

SEQ ID NO: 53565 - DNA, 429 bp, Glycine max
  Clone ID: LIB3167-048-P1-K1-H9
gtttgttttctgcatgttaggaataggatggagggggttgagagcaaagagagagaggtgatggtggcaaaaccagttgcagtgggtgtcagtgatttgcttctgaggctgttggccttcacagtcactcttgtcgctgctatagtcattgcggtcgataagcagaccaaggttgttcccattcagctttcagattccttaccacctttggatgttcctctcactgctaagcggcatcaaatgtctgccattgtgtactttctggtgaccaatgcaatagcatgcacgtatgcagtcctgtctctacttcttgccctcgtgaatagaggtaaaagcaatggcttgtggacattgatcgctgtcctcgacgcattcatggtggctttgcttttttccggcaacggagccgccgcggaagttggtgtcctt

SEQ ID NO: 53566 - DNA, 76 bp, Glycine max
  unsure at all n locations
  Clone ID: LIB3167-049-P1-K1-A9
ggggattggngccattacgggtacgtgggttttcctggtaaaaatcccaattgtcaattagttatgatgagaggtg

SEQ ID NO: 53567 - DNA, 189 bp, Glycine max
  Clone ID: LIB3167-049-P1-K1-E1
gttgcagaacatctgtttcgttgttttatatgatgtttggctgagaaagtgtgcaacaactggatacatattcttttagatctaagcaagagtttccctcgtgattgctccaatgtacaaatatccactgtattattggagttatctcttttctctctcttaaaaaaaaaaaaaaaaaaaatatataaa

SEQ ID NO: 53568 - DNA, 393 bp, Glycine max
  Clone ID: LIB3167-050-P1-K1-D5
gtcggttccggcatcgtgctctgctctgcacacctttctctttctctctgtctgaggctctgggcagtgagcacaccacaaactgaaacaaatccctttgagcattcagcaagatgagccacgagctgttggagacgtacgcgtgcatgcccacgacggagcgcggccgtgggattctgatctccggcgatgccaagtccaactccatcgtctacaccaacggcagatcggtggtcatgatgaacctccagaaccccctaaacgtgtccgtgtacggtgaccacgcctaccccgccaccgtggcgcgctttttccccaacggcgagtgggtggtcttcgtcgacgccttcggcttcgtcaggatctggggcacgcgaaacgacttcgttttga

SEQ ID NO: 53569 - DNA, 271 bp, Glycine max
  Clone ID: LIB3167-051-P1-K1-A1
gcttataaaacaggaaaaagaaaatgggacgagtgtttagatcgttggaatactatataacgggtgttgttttttatttaggagaaactatgggtggcatatctatctatattagcaatattcagacgtagcgatgtataatgaacagctatgcctaataatcaaatatgatgtgtcaacactgatcattctgtcgatgttatacggggaaattcgacaaaaagctctgtgctgtgagggccgagcgagcggtttaaaggattcaagctta

SEQ ID NO: 53570 - DNA, 497 bp, Glycine max
  unsure at all n locations
  Clone ID: LIB3167-051-P1-K1-A11
ggaannncccgggtgcggccgacgcgtcacagggaaaaccgtttcttaattgcaaaggaaaggataaacactctaacaagncttggttngntaagttggtctagagatctttcatcaatggagaggtgttacttctgagaaagggtcaattcctttcggataaccagttgccctcttcaatgcctgttggctatgttatnggatctatgaccaaaaagaaagcctgctgagtttgagaccaggttattagcagcaaccagtagcaagtgatccacagaaatattgtgaagcatttcttgggaagccaaacacagagtattgtaactggattcttgactcatagaagtggggaggtgcaattgaactttcaatattagcagattattatggacgtgaaattgcatcatatgatattcagacaactcgatgtgatttgtatggtcaggaaaggaattattctgaaagagtgatgctgatttatgatggtctccactatg

SEQ ID NO: 53571 - DNA, 422 bp, Glycine max
  Clone ID: LIB3167-051-P1-K1-A12
ccggggcggcccacgcgtacactcaactttgctttctcccaaagccatgactcttttatattccctttctcttttacaaggccgttctcttattatacgttgcacactcctcttcttgtctgcctctgacacctcctaactgttctaaaagtggtgtaaggaacacatcaaaacatactcttcctaggaagaaaaactttacaggctcaaagtgttcgaggacaactattcctttgtctcccaacacaaccaaaactccaataataacaataataatccaagctacactctttccctcaacactttacccgatctcacccaccatgaattcaaaaccactcgtctcgttcttccccctaccttgcttctattcaaactttcccaaaatcaacaattccttgaccttttgcacattccttttt

SEQ ID NO: 53572 - DNA, 440 bp, Glycine max
  Clone ID: LIB3167-051-P1-K1-A2
ggcccaggcctacgcagaactaataaggagaagcaaatggcttcctcaatgatctcttccccagctgttaccactgggaaccgtgccggtgccggcatggttgctccattcactggcctcaagtccatggctggcttccccaccagaaagaccaacaatgacattacctccattgctagcaacggtggaagagtgcaatgcatgcaggtgtggccaccagttggcaagaagaagtttgagactctttcctacctgccagaccttgatgatgcacaattggcaaaggaagtagaataccttcttaggaagggatggattccttgcttggaattcgagttggagcacggtttcgtgtaccgtgagcacaacaagtcaccaggatactacgatggacgctactggaccatgtgggagctgcctatgttttggtgcactgatgc

SEQ ID NO: 53573 - DNA, 356 bp, Glycine max
  Clone ID: LIB3167-051-P1-K1-A3
aaaaaaaaaaaaaaaaaaaaaaaaaaaaaaacaaatttatttttaaaaaaaaaaaaaccactgtggagggtttaatttaaaagcctcgcccatcccacaaacttacctccactccatttctacctaaaacaccttcaattacccacacttacattcacctccctacctctcaacaccccaacgttctcccctcttaaacccctttcctcccccacccttatctccatttctacactttctcctacctccccctccctaattacctacaaatcccttacccattccccatttctaaatataaccccccctatacctcccttttaaccccccctccatcacttttttataccccccct

SEQ ID NO: 53574 - DNA, 435 bp, Glycine max
  Clone ID: LIB3167-051-P1-K1-A4
ccgccaacccttccgccaagagatagccttttaatgaatttttcacgagaccaaccaatgtcaatcgatgcaggtatagatgcggaggctaagccaaattcattgaattctgctgctgtgggggcatctgttggtgctggtcttggccttgtcctggcaattgtaatgggtgcagcatctgccctgaggaagccctaaagaccaaattttccttataattgacccggtgctgctcaacagaagttaatattgtgtctgcccggtgttcaaataatttttgttattattaggatttcattctttccctagataatatagatagatagaagaaatttgtatgaaggcaagttttaatttatttgtcacactggcaacattttttcactcatttatttattattttaaattcttgagttttgagtttgttgtattgtc

SEQ ID NO: 53575 - DNA, 419 bp, Glycine max
  unsure at all n locations
  Clone ID: LIB3167-051-P1-K1-A5
cggggggagataacctggctgccaatttcagcagggaattggctgactatattatttacataatggacgggtctttcggtgatgaagttcctcnnaaaggtggtcctggaatcacgcaagctgatctccttgtgataaacaagactgaccttgctcctgcaattggggctgatttggcagtcatgcagcgggatgctctgcggatgagagatggagggccatttgtctttgcacaggtgaagcataagattggagtagaagaaattgggaatcttgtcttgcaggcatgggaagcagccacagggaataagcgtcattaacatttctttgaaaaacggnttcctttgtgttgtatattttcttagcatgtttagtaataactccagaaacatgatgttcacgacgtggattcgagttct

SEQ ID NO: 53576 - DNA, 448 bp, Glycine max
  Clone ID: LIB3167-051-P1-K1-A6
cagagaaacaaagttagaagtaaagaagatcatggcttctctagcaaccttggctgctgttcagccagctactatcaatggccttgctggaagttccctctctggaactaagctctctttcaagccctctcgccacagtgtcaaatccaagaacttcaggagtggtgccgtggtagcaaagtatggtgacaagagtgtgtactttgatttggaggatctgggcaacactacagggcagtgggacttgtatggctcagatgcaccttcaccctacaaccctcttcagagcaagttcttcgagacatttgctgctccattcacaaagaggggattgttactcaagtttctgatattgggaggtggttccacccttgcatacttcagtgcaactgcctcaggtgacattctaccaatcaagaagggaccacaactcccaccaaagctcggt

SEQ ID NO: 53577 - DNA, 356 bp, Glycine max
  unsure at all n locations
  Clone ID: LIB3167-051-P1-K1-A8
cacgcgtccggagctataagctagtttatcgttttgagaatatgaagttntttgggttcgggttttttcaggagttggtggtaacataaccatgccatggcgcatgctaccaaaggttccctctccgaatgaaaactggctatggtgagcgttcttcggaggtaaaatgcgcaagttttaggcttgctgtggaagcacacaacatccgagccttttaaaccattcctgaagagtgcgttgtaccaacaaaggactacattaatggcgaacaatttatatcagactctaaaacagtttaccaacaagctttcttttatgctagtgaactctaagtccatcacaacgacatatttata

SEQ ID NO: 53578 - DNA, 434 bp, Glycine max
  unsure at all n locations
  Clone ID: LIB3167-051-P1-K1-A9
cacgcgtccgcccacgcgtcctcccacttttttttttcaggccaagccaantaagcgcatcgcttattatcaccggaaatggcttcancttctgttcccatggctttgtcactgagctctgttaccaacaacaacaagccttcatccgaagccttcttcaggccactacccctacgccaaccaaagaggaccctcttcaccacgaaagcagtgtcaaactccaagcctcaaatcaatgcatctttgaaggagaaagcagttgccttactcacagcaactttttgtgacagcatctattgttgttccggaagtttcttcattctacttgaatattaaattctccccttttcttaaaaaaactttcttatttaacaatcttttccttgtattgattttttactatcttactcttattttcaatgccctcttctatt

SEQ ID NO: 53579 - DNA, 449 bp, Glycine max
  Clone ID: LIB3167-051-P1-K1-B1
cccacgcgtccggccaccgctgcgacgccgttcgtgcatttttgaggtgccgctgtcatgtgtgggcgtggtggaccaaggaggagtgataactccaaatattatgatattctcgggatttccaaaaatgccagtgaagatgaaatcaagaaggcctatagaaaggcggctatgaagaaccatccagataagggaggagatcctgaaaagtttaaggagttaggtcaagcatatgaagttttaagtgatcctgagaagaaagaactgtatgaccagtatggtgaagatgcccttaaagaagggatggggggaggaggctcgtttcataatccatttgatatatttgaatcattttttggaggagcaagctttggtggtggtggtagttcccgaggtagaagacagaagcatggtgaaaatgtggtgcattctttaaaggtttcctttga

SEQ ID NO: 53580 - DNA, 318 bp, Glycine max
  unsure at all n locations
  Clone ID: LIB3167-051-P1-K1-B12
gaanncccgggncggcccacacataaaaccacgcttccttccacgctttctctagtttttcctcnatttctctgcacttctaaaagggatgttttttattaacaaactagaccaccccaaacctctattaattattatatacattttttcttttacaaatttatttcaaattcttccaaccaacatttactaaatttttctacttccataaacaatactaaaaccataaaaacaacatatatattccctcatttatttaaatacacaatttaacttaaccttccaaatcttcttcactattattgttttttctttcat

SEQ ID NO: 53581 - DNA, 308 bp, Glycine max
  Clone ID: LIB3167-051-P1-K1-B2
cttcgttcacataactcaacgttaattgaccgttgactaaacactcaaaattgacaagagacatatcgaggaaacacctgacaatagatgacagctgacttgtggaatatagacagtacaaagcaagtcaggaacataacaacatgagagaaagggttgttacaatcatacaactttcaaggattaattacctaatagatcatatgggtgtggccattttactgctttacaacttttggttcatgtacttaccttgatggatctaaatctgagagcttctaatgtctacatctagggtaactgcacat

SEQ ID NO: 53582 - DNA, 448 bp, Glycine max
  unsure at all n locations
  Clone ID: LIB3167-051-P1-K1-B3
aagacagaaagatccaacactcactcttccaactttcactctctctctttccgaccaaaatgtggatgggcagctaatctgggcggccaccgctnatcgtaaaaatcgggccttacaccgtcttcatgacgccgccgtctacacccaaacccgccgacgacaaccccgttaccaccaccaagatcgcacctccgccgcctcagattcccaaagccgttccttcccccaaacccaaacctctctccgattccgacgattccgttttcggcttcttcagaaacgccgttgccaaggtccaaaccgcccactcaagtttggatgatcatttggcacgttggtttggattgaatcagtcaaagtatcaatgggctcttgatgattattatgagagcaagggagtggaaaaaggagacattaaagtgaaagaaatatcgagcaaagtacaaag

SEQ ID NO: 53583 - DNA, 379 bp, Glycine max
  unsure at all n locations
  Clone ID: LIB3167-051-P1-K1-B4
aaaaataaaatttcntcgaaacttttatactattttactttcacactaaccnaaacaaaagagaggttattctttaaaaggcgcgcccacctaaacanataaattactataccaaaaacaacatataacccattccaacactcctacatcatgccattgatcaccttattcaatcaaaattaattccacagtacaaaatgccaaatccttatataatcaactctttttaaaaggacctaattttctcatccattccttaaaccaccacattttgaccaacctctatccacccttcttatctctcaatcaactattgctttttcacgtatccctacgagttaaaatgattcaaactacaaataaccactcatgctctcat

SEQ ID NO: 53584 - DNA, 353 bp, Glycine max
  unsure at all n locations
  Clone ID: LIB3167-051-P1-K1-B6
ccacccactcttctctagcttcttcaaggatccccactaacaccaagggcggattcaaaaatagaggcggctgtcccaacccaatncnccttaaanagacttgaggtgacagaattctctgggctaatatccacttcatgtgtgacatatgctaacgatgctagagaatcttcctttttagatcttgtagcttcccaactcactcccaagaccaatggatcatcaactcctgtgagtggagagacagtttccaagttgaaggtggcaatcaatggtttcgtactcattggtagaaacttccttcgcttctttcacggcccaaaagactcacccctttaggtcttttttttcaa

SEQ ID NO: 53585 - DNA, 195 bp, Glycine max
  Clone ID: LIB3167-051-P1-K1-B7
aaaaaaaaaaaaacacaaacctcttccccttctaccacttcttatttacacacacacaacccacacaccgccccttttaaaataaaaaagggcgcccaaccaaacaaacaaaaaaaaaaacatttccacccccccaaaaaccacccaataatttcaccccccccccccaaccacaaccacttttaaatatccccc

SEQ ID NO: 53586 - DNA, 270 bp, Glycine max
  unsure at all n locations
  Clone ID: LIB3167-051-P1-K1-B8
catgtatgatggatatagtttaaagttttttatttctcttgatggcataacctttgtattgttttaaatcaggggttgtttataataacaccactncaatataatntntacttttacttcatatccttgaaatgatttcaagagagtaaccattggacactatattgatttaaaatttagttttacattttttaatttattgttactattatcctataaatttcaatttcttctttattaacacgctctctttattattttaaaataaaa

SEQ ID NO: 53587 - DNA, 453 bp, Glycine max
  Clone ID: LIB3167-051-P1-K1-C1
ccgggccgacccgcgcgtccgccgaataacccaatgtatcatcatcctctgaattcaactcgctcgcacatgggaatttattgagcaggatcaaccagatctgtgactgtgttcgattgggtaccaactattattcagtgctgcagctactactgtggcacaacattaagcttttagttgaatcagataggctgtcagtaacgtaaaagtaatccctgtgccccagccatggctgcaccgtttttctcaacgccctttcagccttatgtttatcagagtccgcaagatgcaattataccttttcagattttagggggtgaagctcaagtggttcagataatgttgaagccacaagaaaaaatcatcgcaaagcctggttctatgtgctttatgtctggatccgttgaaatggaaaatgcctacctttcagaaaatgaagtaggcatatggcag

SEQ ID NO: 53588 - DNA, 59 bp, Glycine max
  unsure at all n locations
  Clone ID: LIB3167-051-P1-K1-C11
ggaancccggtcacccacacgtccgactagttctagatccgacctcccccttttttttt

SEQ ID NO: 53589 - DNA, 436 bp, Glycine max
  unsure at all n locations
  Clone ID: LIB3167-051-P1-K1-C12
cttccctgttccctggttttgcagcanaaagcctttcggaagcttactttgctaatggggtggatttacatctgacgactgagatgctcaatcagttagagcttcaagttgatggcggtttcaatcagaatctgaattcaaagactctgtcagctcccaatctcagtgcaatggactaccctgcacttacttcaccagatggccagactgcttcagtaaaatatgtggttgataatgtccaacaaagtggcaatccttaccgatcatttgacagtgatgtgctgcttttcaaatctggctcttcagttccatctgggggtggtgctattgaatttgcttcagctgttaggaagttggcttctcaggattctggtggtatttggaagtatgtaaaaaattgctctggtgatgcttgtatcggctcaagtaggacttc

SEQ ID NO: 53590 - DNA, 436 bp, Glycine max
  Clone ID: LIB3167-051-P1-K1-C2
cccacgcgtccgcccacgcgtccgtattctttcaactatgggtgctgctcttcagagcctgacgtggtgccccacgtctgcttgcagcaatagccaatgatgatattttacctattttgaactactttaaagttggagatgccagtgaaccacatgttgctaccttttttactgctttcttatgcattgggtgtgtcgttattgggaatctggatcttatcactccaactgtaactatgtttttccttctatgttacactggtgtcaacttatcctgcttccttctcgatcttctagatgcccctagttggcgtcctcggtggaaatttcaccattggagtctgtcccttgtgggagcattactttgcatagtgatcatgttcctaatctcttggtcattcactgtggtgtctttgctccttgcaagcctcatata

SEQ ID NO: 53591 - DNA, 380 bp, Glycine max
  unsure at all n locations
  Clone ID: LIB3167-051-P1-K1-C3
caatgatctcttccccaggtgtgtctcactatcaaccgtgccggtgcccacataattgctccattcactggcctcaagtccatggctggcttccccaccagaaagaccaacaatgacattacctccattgctagcaacggtggaagagtgcaatgcatgcaggtgtggccaccagttggcaagaagaagtttgagactctntcctacctgccagaccttgatgatgcacaattggcaaaggaagtagaataccttcttaggaagggatggattccttgcttggaattcgagttggagcacggtttcttgtaccgtgagcacaacatgtcaccaggatactactattgacgctactggaccatgtggaaactgcctatgtt

SEQ ID NO: 53592 - DNA, 427 bp, Glycine max
  unsure at all n locations
  Clone ID: LIB3167-051-P1-K1-C4
gcgtccgctatgagcaaaagctatgctcaagtcatatgaatgtatttttagagcagccactgnccaagaggtgggttcactataccggtttggcgctacacaattctgcttccattatagcagtcccttttgtgctaggaactaagggtgaggatacccaattggtgactgtagagctagagtccccaataccatctgttgatgactgggtcggagttttttctccagcaaacttcaattcatcaacatgtcctgacactgacggcattggctgtgtagaggaaccatacatatgcacagccccaataaagtacaagtatgccaactactctaaccgaaactattcaaagaccgtgaaagctattttgaagttccagtttatcaatcaacgtgcagatttctcatttgcactattttcaggtggatt

SEQ ID NO: 53593 - DNA, 343 bp, Glycine max
  unsure at all n locations
  Clone ID: LIB3167-051-P1-K1-C6
gcgtccgccgacaccattgacaatgtgaaggccaagatccagtacatggaaggaatcccaccgnacccagcagttcttatttttgctggcagaacagctagaggatggaaggaccctcgctgactacaacatccagaaggagtcaactctgcacttggtgttgcgtcttcgtggggggttttaagctggagctgatttctgtgtgatgttcgatgttggattttcccaaacattttaagaagaaatgtgatgtgtaatgggtctgtaatgacctttgaaaataagtntggtttgtgttgaactctattgtcccattaatgttactactgtttgttatcaaaaa

SEQ ID NO: 53594 - DNA, 402 bp, Glycine max
  Clone ID: LIB3167-051-P1-K1-C7
acgggggcacggaggatcgcattgttcaatgcatcactacttgggtgtttgccatctcagggaacgctgtcattagggtgtagagggaaaaattgtagtcaatattaacaacgcagtacagatatataacagcaaattgtcgaaggagctggattctctcaatcacaaccttcaagatagcaggatagtttacattgatgtttacaaccctctctttgacatcattgtaaactacaataaatatggctataaagtcggagacaagggatgctgtggcacgggcacaatagaggttgtgttattatgcaaccgtttcactccattgtgccccaacgatttggagtatgtgttttgggacagttttcattctacttaaagcgtttattaaaggctcatagcttc

SEQ ID NO: 53595 - DNA, 290 bp, Glycine max
  unsure at all n locations
  Clone ID: LIB3167-051-P1-K1-C8
ccgggccgacccacacatcacacccactctntccgctttcccctaattccgactatgtttattccacggccctccacaatnagccgtctgctttttattaaacaaaggcgccaaacccacatcccatacttcttactccttcccactcaataccattcaccanttccctcccacaagcccattccaccttccccctcactttccttcctaccatcctctcctcaaatcccctcacaaactaaatattctacttactttacttatacacaaccatttatataacttttacc

SEQ ID NO: 53596 - DNA, 389 bp, Glycine max
  unsure at all n locations
  Clone ID: LIB3167-051-P1-K1-C9
acgctttctcacgcacgcacagtcactctcgcacttgttgtcctctgatctccctnaaaaaccgcatcactaactcaagcgtagggatctccntttaattccttttgaatctgaaagaagaaacagacggtggcttacggtcatcaattgcagagatctattaagattctggaatggcagcaatttacagtctttacatcatcaataaatctggtggattaatctattataaggattatgggtcagctggacgaatggataccaatgacagcttgcgggtggcaagtttatggcactcaatgcatgctatctttcagcagttatcacctgtttcaagttgtttaggaattgaacttcttcaaacagatacatttgatcttcattgcttt

SEQ ID NO: 53597 - DNA, 432 bp, Glycine max
  Clone ID: LIB3167-051-P1-K1-D1
gatgaatttgggacattttaatgatttttggaggggaaaagttaattggtgtaactttccatgtcctatagagaccacgaattatcactctacttaatataatcaagtaggttctcatttatttcctggtttttttctgtcaacttgaatgaccttgataaaaattatgtgtttgcgtatattagcataaagaaaaaaactataatttaaacacagttagttcctcatatttattttctgaaaatctaaaggaccaaggagctttacattttagttgttaggtgaaaggatttctctatcagttcatttatcttcaattgttgcgaatgtgtatttaatagcctaagatgattacttcccaataattattatattattcattcttacacagtagtgtctatgcagtataattgtagataattatttatttat

SEQ ID NO: 53598 - DNA, 425 bp, Glycine max
  Clone ID: LIB3167-051-P1-K1-D10
gctgaaagttattcaaagaatattgaaaaaacaataaccagggtaaaatcaatccctggggtgtgcgacaatgtgggcaggaaatttaaacaaatatttgatttgactgaggatgaagccaacttccacatgaaacagagtgcattcttgtataagcttaatgttcagacaatgccaaagagtcatcactgcctgtcactcaaactaactgtagaatatttcaaatcctcgcataatgacaaaaaggctgacgaaaaaaagtttattgattcttcattgcaccattatgttattttctctaataatgtgcttgcagcttcagtagttatcaactcaactgtatttcatgcgaaagtatgttatgcttctagtcatgcactacctatttgatagaaggtgagtttttggggctattataatcattt

SEQ ID NO: 53599 - DNA, 444 bp, Glycine max
  unsure at all n locations
  Clone ID: LIB3167-051-P1-K1-D11
cccacgcgtccggcttgaatccaagttgggaagaaaacaatggtttcagcttcncttcggttgtggtcttggataggacctactcctatatcccaccgttacacccataaatttgcttccctaacctcactcaaattagccactcctgtttcttctactaataccgtttatcttcccaagcctctagttgtgcgttttgctctaactgagtccgactcgcccaaatccatagaacctgaccctcaaactcttctccaagaaattgctgacagttttgatcttccttccgattacttttcaaagcttcccggcgatcttcgattagacctaaacgacgcggcgttcgacctttcaaacggacctgttttagatgagtgtggccaagagttgggagagactttgctgaatctctctcgagcatgggaacttgctgacacatcaacc

SEQ ID NO: 53600 - DNA, 447 bp, Glycine max
  Clone ID: LIB3167-051-P1-K1-D12
cccacgcgtccgctttgagttgcattacatcacaacaacaacatggctgccactgctgctgcgggcatagcttccttgttgtcttcttctattaacagtgtcaaatgtcttcgttcctccaagaactgctccataatagaccctctcataacaacagtgccctcaaaccgtggcatgtttgggtcacacttggtggaacctttgtccattaattcgcacaagttgtggggacctagaatttctgctgctgttgcacaagaagaggctgttgttgttgtggatgatgatggtgctggtttagttgaagaagagaaagtggaggagaatgaaagagaagcggtggcagaacaagactctgattcctctgccaccaagctttattttgggaatttgccttatagtgttgatagtgccaagcttgcagggttaattcaggattatggtagc

SEQ ID NO: 53601 - DNA, 443 bp, Glycine max
  Clone ID: LIB3167-051-P1-K1-D2
ctgagtagtaactcgtaagggctttggttcatcgaaggctgaaattgctgaatcacagcttggttggaatcggtccaatgagggctttttgcacaaaattcccaccactggtaccaggttagtgccttcccttccattgcgaccatggctgcctggattcgatcttcttcctctacccctttaatctcgaaataacgttccaccttattcgtccagccaaacgcatcatctccgtcaaaaattggaatctcaagtttctgccactttacctctcaatcgcgattctggtgttctgcatggtcacgattgccgcttccatgatcggtgctcgacaagttccgaactgccaccattagctctgccatttgtgccttcagctccgctcgctcgatgcgttcatcttcagacttgcaacgtcctcacacgtgttgatcttgccttca

SEQ ID NO: 53602 - DNA, 445 bp, Glycine max
  Clone ID: LIB3167-051-P1-K1-D3
cccacgcgtccgtccacgcgtccgcccacgcgtccttccacgcgtccgcccacgcgtccgcccgcgcgttcgaaacccactaagatggcttcctttgtatccttcctagtgctgcttcttgcagcccttatcctcatgcctcaagggcttgctacttactacaaaccaattaagaagccaccagtgtacaagcctccagtgtacaagccaccagtgtacaaaccaccggtttataagccaaaaccaccggtttacaagccgaaaccaccggtttacaagccaccatataagaagccaccatacaacaaaccaccttatggaaagtacccttcagtagaggacaacacccatgcctaaagcaagcaatgaggtctattatctacttaataaataagacgaactgctttgtgttttctagcattgtgatttacaacttcgtagcaat

SEQ ID NO: 53603 - DNA, 437 bp, Glycine max
  Clone ID: LIB3167-051-P1-K1-D4
caggctttgagtaatgggctttataagagtgtgtggcatcgtgctgttgtcaatgttgagaagccagggctttctgtggcgtgcatttctttgtccaaatgacgaggcattgataagccctgcaaaaccactcacggaaggtggatccgaagcaatatacagaggatttacatatgcagaatactataagaagttttggagcaggaacttagaccaagaacactgtttggaatttttcaagaacaagtaacccaagggtatcttaatattttgtttttcactcctccttgttagtgccacttgcttttgttgttttattgttggtacatttggttagtgcaaattgtagtttgttacacaacttctgtgtcagacgctcatgatttctcttgtggtgatatagctgcaagactgaactgcttattcccttgcttcat

SEQ ID NO: 53604 - DNA, 455 bp, Glycine max
  unsure at all n locations
  Clone ID: LIB3167-051-P1-K1-D5
cccacgcgtnccgcgcaaccgttctcgatgacgtggtcggtcggcgaggcgaagaagctgctgtgtggaggggggcgaggcagacccggcggcggctctggcgagcgcgcggcacgagttcggggagcacggcggggtgaacatgtcgatcgaggcgtcggcgacgttcacggtgatggagccggagacgatgcggcgcatgttcgccggagaactcggccccgaccgcgacttcttcatctacagccgccacttcaacccgacggtgctgagcctcagtcgcctcatggccgccctcggaaggcaccgaggccgcctactgcaccgccagcggcatgtccgccatctccgccgtcctccttcagctctgcagccacggcgaacacgtggtcgcctccagaactctctacggtgggacccacgcgctcctttcacactttcttccgcgcacgtgc

SEQ ID NO: 53605 - DNA, 383 bp, Glycine max
  Clone ID: LIB3167-051-P1-K1-D6
tgttgatcgagataactagaaacagtgtgatgaaaatgaaggtccttgttttcttcgttgctgcagggttggtagcatggcggtgccatgcgtaccatatgttccctctccgaatgaacactggctatggtgcccgtactccggaggtgaaatgcgcaagttggaggcttgctgtggaagcacacaacatctttggctttgagaccattcctgaagagtgcgttgaagcaacaaaggaatacatccatggcgaacaatatagatcagactccaaaacagttaaccaacaagcttacttttatgccagagacctcgaagtccatcccaaggacacatttgtgttcagtatagatggcaccgtactctctaatattccatacttt

SEQ ID NO: 53606 - DNA, 438 bp, Glycine max
  Clone ID: LIB3167-051-P1-K1-D7
ggttaacaagggcgacgcaccggcattgccagagactcttaaaaattacaacaagctggggggtcttggcttcaagagtggattcttgtcaggaagatatcttgacaaaatggccgtaacagaagcaaacctaaagaaggctggcttccacacatgggagcagttaattctcaaggatccacatcttatcactccaaatgcactttcatacaaatcagcaatgagagagaatctgttgaggcagggatacagaattgttggaatcattggagaccaatggagcgatctgcttggagaccacagaggcgaaagcaggacctttaagcttcctaatcccatgtactacattgagtagtaccttcacctctctcaacaatctaactagagtttgctcctatctatatgtaataaggtatgctgatatgcactattcaaata

SEQ ID NO: 53607 - DNA, 355 bp, Glycine max
  unsure at all n locations
  Clone ID: LIB3167-051-P1-K1-D8
acgatctcaaacacctcaacttcatttctctgctccatattctcaatctttcatccaaaagcgcagattttcattgacacgaggacaatgctaanaaaccacaattcctccatcactccacgccactacaacacccacaaggtgttccttttctgcaactacattctcttgggtgcagcttctagctgcatcttcctcaccctctctctgcgcctcattccctctctctgcggcttcttcttcatccttcttcaggtctttacgattgcgggcgcaccctccgggtgcgctcccttgagaactaacaggcggtactctgcacacatggttgccactgttctaaccgctatctttc

SEQ ID NO: 53608 - DNA, 233 bp, Glycine max
  unsure at all n locations
  Clone ID: LIB3167-051-P1-K1-D9
acacccacgcgtccgcccacgcgtcctcagagtgctcttagaaaggtagcgttttttttggcntgctttttttttcaatggtgggccatccacaaacanaanacagttatgggtttgattctgttgctgctgttatttgcttcggatgtgagtgcttggactgttgaaatccatggaagagttgtttgtgatgttttgttgtgattcttctctcgtaccttaataccatgatc

SEQ ID NO: 53609 - DNA, 442 bp, Glycine max
  Clone ID: LIB3167-051-P1-K1-E1
gaaggacaagttcttcgaccacttaactcggccggacttcatatttatcaacccaaccaaccgggggagcttataatcccggcacgttgatgatcaaagctgatcatctaacaagactcagtctcacgaggtggagtgctgattgcaaaagtgctactgctctttatcagcaagcagctaatggctttagagtcgccaaggactatgagaatgctaaaatagcatatgataaagcttctaaaggacaagaaatgctttcttcaccttgagatgcggctaagcacatggaattcgctgctgctctcgcaaaggatctaagacactggcaagaagttgtgcactcctatcgaaaggcatctgaattatatatggagtgtgggagaccacaacctgcatcagatgctcttgccaacggagcccgtgctctggaagatagcatgtc

SEQ ID NO: 53610 - DNA, 446 bp, Glycine max
  unsure at all n locations
  Clone ID: LIB3167-051-P1-K1-E10
ctcacccattcacacactgaaatgagcaatttccatagaatatcgcacgaatcctaccgtccgcagggcacggatctcgtgtaccctccaccccaaccgggttacccatcggcgccgcctcatgaagggtaccctccgccgccgccgcctccgggatatggtgggtaccctccaccgcatccgccgcagcgtccgccgtatgactcctaccagggctacttcgacaacgggcgtncaccgccacctccgccgccgcactaccattaccagcacgtggatcatcatcacctccacgatgagcccgggtgcttttcattcctgcgaggctgcatcgcagcactttgctgctgttgtgtgctagaggagtgttgcttctaataatcacaccacaaaagttgtttcttcagtttgctgcactttgttatggctctctagagaaatgtggc

SEQ ID NO: 53611 - DNA, 444 bp, Glycine max
  Clone ID: LIB3167-051-P1-K1-E11
gtagaggaagagtgcgaaagaaagatcgttctcgatgacagaggggaacggtgacaaagctgtgcgaaagatcgcagacgcattcaatgaccttgcaaacgttttcaccgattctcagagcgcagaagcagaggtcaaggttgctcccttctctcatgcctgctctctcgtctcccctctcttcggttgcttgggcgtcgccttcaagttcgccgaaatggattacgtcgccaaggttcatgatctggcagaggcgtccaagtctattcagaatctgcagtctctgattgagctggatgtgcaagctaacactgttaggaaaggaggtagccatacgcggaatctgctcagagtgaagcgcggacttgacatggtcagagtgctctttgagcagattctagttacagagggtaattcccttagggatccagcttccaaagctta

SEQ ID NO: 53612 - DNA, 190 bp, Glycine max
  Clone ID: LIB3167-051-P1-K1-E2
aatcgaataacatagataggtgaaaatggcgcagtgtgtgaccaacacattcctgcaccgaagacgcgtttcttacagatgacgggctcccactaaaaacgttcctagagcgtgctcactgcacaagcgtggtgcattgccgaatgaggatccatccctcaattctacaacagacatcgaagcatgtact

SEQ ID NO: 53613 - DNA, 431 bp, Glycine max
  Clone ID: LIB3167-051-P1-K1-E4
aattactactttctctctctttgtaacttgtaagcatgtagtcctcaaagatctatgcttaggtggtcctttgcatgctgttgctctcctccgccactcccattctcggttgtggctactgtggcaaaccccccaaaaagcacaagcctggtaaaacaccaaagacacccacagtacccgttgttaagccaccagtcacaatccctcccattgttaagccaccagtcacaatccctcccattgttaatccaccagtcacaatccctcccattgttaatccaccagtcacaatccctcccattgttaatccaccagtgacagttccacccgttgtgcttccaccaatagtgaagcccccgggttttctccctccaattcttaacccaccaagtacaccaacaccgtcccccgggaagggagggaacactcca

SEQ ID NO: 53614 - DNA, 314 bp, Glycine max
  Clone ID: LIB3167-051-P1-K1-E5
gcatacgaccactcctacggaaaaaagagaaacaaatggcagcactggctggctttacgcggcgtcaccggagcacagaacagcatctatatcgaaaatctcgctcgctttgctgttgatgaacacaacaaaaaagagaatgcagttctggagtttgtgagggtgattagtgcaaagaaacaagtggtttctggcaccttgtactatatcactttggaggcaaatgatggtgtgacgaaaaaggtttatgaaactaaggtgttggagaaaccacggttgaacatcaaggaggttcaagaattcaagcccatcac

SEQ ID NO: 53615 - DNA, 464 bp, Glycine max
  Clone ID: LIB3167-051-P1-K1-E6
ccggaccggaaggcccgggccgagcgacacaccacgcgtccgtgttaatttgttgagagagagcaatcaaaaacattcatggcgtcttccaaggggagagaagaaaacacggattaaccaccacctgataggctgatacaatacaatctcctttcctttttcgacaacaagaatggctgcgaaatctagttcgagttcgacaacaacaaacgtggtgactctgaaggcggcgtgggttctcccgcagcgcacgcagaacatccgtgaggtgtacgaggttgggcggaagctcgggcagggccaattcgggaccaccttctagtgcacgcgccgtgcgagtggtgggaagttcgcgtgcaagtcgattccgaagcggaagctgctgtgcaaggaggactactaggacgtgtggcgggagattcagataatgcaccacttgtcggaacacgccaacgttgtccgca

SEQ ID NO: 53616 - DNA, 297 bp, Glycine max
  unsure at all n locations
  Clone ID: LIB3167-051-P1-K1-E7
gaanncccgggccgacccacacataacacccactcctccgaccacattcacctnaagcttccatagcaatggcttcccttccancagccaggttttataataacgttggcatctcacaaaaacttataaaccccatcaacttcatttctgccacaagtccacctccatctacttttagacctgcctccttcaagactgtaacatctttcctccaaaaagaaaactacaccaacacctccaaaaaaatctacttctaatattcctgccaaatattaactttaccctaaatttttttcc

SEQ ID NO: 53617 - DNA, 158 bp, Glycine max
  Clone ID: LIB3167-051-P1-K1-E8
tcgacccacactccgcccacgcttccgcccactcatacctccactctttctactattgactaacaaaactatcggcagttgtttttataactgcagcaatcccttctagcaaattattattcattttaataccttggcctttaaccctttcaaccatt

SEQ ID NO: 53618 - DNA, 423 bp, Glycine max
  Clone ID: LIB3167-051-P1-K1-E9
atgatcgtgattggcacttttcatgtggcacaaaggagtacaaagttctaatggaccaggtggatcatgtttcaactgcgtttctggaacttggaaagaactaccaggaagcaattgaggacattaccaaaagaatgggtgctggaatggccaaatttatttgcaaggaggtagaaacaattgatgactatgatgaatattgtcactatgtggcaggacttgttgggctgggtttatcaaagcttttccatgcatctggttcagaagatctggctccagatgacctttccaattcaatgggcttgtttctacagaaaacaaacattattcgagattatctggaagacatcaatgagatccccaagtcacgcatgttttggccccgacagatttggagtgaatatgttaacaaacttgaggatt

SEQ ID NO: 53619 - DNA, 322 bp, Glycine max
  Clone ID: LIB3167-051-P1-K1-F1
tgatttttcagcagttcatgagactttgaaagctcttgatcattcatcttgaccagatggatgtcggaattgattaaaccactgttaggcaacagtgtgatgcgaaccatctatttatgaaacagcaatttgagcataggtcattattgtagaatcttgttgaaatgaatgaaccttgtaaaattttgctactttcactgcaagattaagctataaaatgcaagaacattggtttagttcaactgattgcagacttgtagtggacggcttggccatctgttcacagacgttaattgttttagtttatgtgagtggtttgaat

SEQ ID NO: 53620 - DNA, 312 bp, Glycine max
  Clone ID: LIB3167-051-P1-K1-F10
agcggttaagcaagtgtcctagtcgcagttgtctatcatatttagttttgatagtgatgtttgtattttttttaatgatgggatgttccctaataaacgtgatggaattttgttgaactggaaatttgcaagttgggattactggtccatgtttatgattttataataaatttatttgtcaaacaaaaaaaaataaaaaataaaaaataaacaaaaatacaaaatattaaaattatccttaaataaaaaacaaattatatacttttaaataatcaataattatctatttataactataaaatgggggggcgg

SEQ ID NO: 53621 - DNA, 448 bp, Glycine max
  Clone ID: LIB3167-051-P1-K1-F11
cccacgcgtccgaatgaaatgaaggaaggagaaagggttatccgaagcgatggcagcgggagcgttgtacttggcaaaaccatcttggtcttatactcccaaaattccgtcgttgccaagagtgagggacagtggaattggaacggttaaaaccaaagtgaaagcgaaagcgggtatcctgggactgggtctgttccacttcctcaacttcgtcgaacccggttcatgtctccaactgcaattccacgaaccccccaatgccctctctttgcccacatgggccattcacgtgtccagtgtcgctgaatggattatagctatggctttggtgtggcaatacggagaaaaatctggatacccaacttggaagggcctttcttggggaatggtacctttacttggtggagctttttgtgcgtgtacatggcatttcttttataactccgac

SEQ ID NO: 53622 - DNA, 432 bp, Glycine max
  Clone ID: LIB3167-051-P1-K1-F12
cctacgcatccttcctagtgctgcttcttgcatcctttatcctcatgcctcaagggcgtgggtgcttactacaaaccaagggagaagccaccactgtacaagcctccagtgtacaagccaccagtgtacaaaccaccgttttataagccaaaaccaccggtttacaagccgaaaccaccggtttacaagccaccatataagaagccaccatacatgaaaccaccttatggaaagtaccctccagtagaggacaacacccatgcctaaagcaagcaatgaggtctattatctacttaataaataagaggaactgctttgtgttttctagcattgtgatttacaacttcgtagcaatgcatattcttgacttttgcatgcacttcaatccttcgtagcattaatgatgtggccaagtcatcatgagcatcatac

SEQ ID NO: 53623 - DNA, 439 bp, Glycine max
  Clone ID: LIB3167-051-P1-K1-F2
cccacgcgtccgcccacgcgtccgcccacgcgtccgattttgtgttatttgacagttaaagggagaagtgggtgtctctgcagattagacattagagtgtgaactccaaactctgaaaccctcaactcaaatccaatcctttggtgggtttcgaattggagtccaaccaaattctaaacacatggactcagctctgtcgcggttgcatctccacaatctccctcctctttcctccgccgctcaccgccctctcttgcagcctctcgccgccgccgcttctttctaccgctcttctcctcctctcccacgcctccgtctctcgccgcttctcgctgctaacaccctcaccgctaatgacgtctcgccaagaagtggactatacactgtcggtgactttatgacaaagaaagaggatttacatgtggtgaaacccacaaca

SEQ ID NO: 53624 - DNA, 448 bp, Glycine max
  Clone ID: LIB3167-051-P1-K1-F3
ctcgattcatcagatattcttcctgctataaatggttcatctgaacaaactagtgggaaggaagatgtgtggtcaaacaaggtgaagaaaagggaattgtccctagatgacgttggcggtagcattggtagttcaagtgctccatcaggtattggaagttctctatcaaatagtacaaaaggaaagaggagcgagagagacagagatggaaaaggacagagcagagaggtgctatccagaaatggaactaccaaagttggtaggccagcaatatctagtgctaagggacaaaggaaactcaaaacaaagcctaagcagaaagcaactaagcattctgtttctgtaaatggcctccttggcaagctatcagagcaacctaaaacagctttgccttccgtttcaaagtctaacgaaatgtctactaacagaactcccaaggagaaagatg

SEQ ID NO: 53625 - DNA, 452 bp, Glycine max
  Clone ID: LIB3167-051-P1-K1-F4
ctaaacgacaacacgcgcaaaaatggttaaacttcttaaaccaaacaaagacgacattgcacggagggacgctacaccggcaaaaaagccattatagttcgaaccttacatgaacgcacgcgcgagcgcccctacagacactgtttggtggcaaggataaagaagtactcttccaaggtcatcaacactgattcagccaataatactgacaagaagtcgcgtatgaaggccttcgtgaagctcgtgaactaccaacacctcatgcccacgcgctacacgctcgatgttgatttgaatgacaccgttacccccgacatgctccaaaccaaggataagaaggttactgctctaaacgagaccaagaagcgccttgaggagaggttcaagactgggaagaatcggtggtcttcaccaagctcaggttctgagcataatattatgcaattttgctt

SEQ ID NO: 53626 - DNA, 426 bp, Glycine max
  Clone ID: LIB3167-051-P1-K1-F6
acttcttgaggtgctggcacggtcgcaaagactcccctcttgatgtcattgccatcaacgacggcgggggcgtgaaacaagcctgtcaccttctcaagtacgattcgatcctcggaaccttcgatgctgatgtcaagcctgttggcagcgacatcatctctgtcgatggaaaggaaatcaaagttgtctctgaccgcaaccctgccaaccttccttggaaggatttggggatagacttggtgattgaaggaactggggtgtttgtagacagagaaggtgcagggaaacacattcaagcaggagctaagaaggtgctcattactgctcctggtaaaggagacatccccacatattgtggtggtgtcaatgagtatgattacagccctgttgaacccatcatcagcaatgcatcttgcaccactaact

SEQ ID NO: 53627 - DNA, 154 bp, Glycine max
  Clone ID: LIB3167-051-P1-K1-F7
aaaaaaaaaaaaaaaaaaaaaaaaaaaaaaaataatataaaaaaaaaacaaaaaaaaaacgcccgtataattaaaaaaagagaggccccaacaccaaaaaaacaaaccatctataattaaaaaccctcattttccccttccctccctattttcc

SEQ ID NO: 53628 - DNA, 424 bp, Glycine max
  Clone ID: LIB3167-051-P1-K1-F8
aaaagatgttgagcaactacagttacggttacagctggagagatccatgcgcattctgcgtgagggggcgatgggtggagcctcaagtactttatctcctggacacaggcactttactgcccagacaaaagacttgattgctgaaattgagttgcttgaagaagaggttataaaccgtgagcagcaagtactttctctgtacaggagtatttttgaacagtgtgttagccggtcaacttctcaacaaagttctgctgttgcttcacctgctcatacaaggcaaggatccaagaagcatccgagtataatttcaagtgcattctgttcatcaaaaaaattccctctacgaaccctgcaaggtctagtttctaataatgactcgaggaataaaaattttgggtctaatcatggtcctttatcacgt

SEQ ID NO: 53629 - DNA, 383 bp, Glycine max
  Clone ID: LIB3167-051-P1-K1-F9
cccacgcgtccggccggggatgactggatatgaattactcaagaaaatcaaggagtcttgtggttttagagagattgcggtggtgatcatgtcatcggagaatgttttgacccgaattgataggtgcctggaggaaggagcagaggattttctgttgaagccagtcaaattgtctgatgtaagacgcttaaaagatttcatcatgaaagggaaagtgaaggaaggggagaaaatatctaacaaaagaatgaggtcaattgattgcagtccacctctaactgcaacatgctcaccagtgtctcttccatgcgagcctccatcatcatcctcatcatcattactctcaccattatcctcaaagaaggctagattgtgatcagaga

SEQ ID NO: 53630 - DNA, 271 bp, Glycine max
  Clone ID: LIB3167-051-P1-K1-G10
acttgctcttcttcttctctttcaccctccaaattttctcactctctctttatcttcaccttgtcagtttaaagcttcagatcacaaccgatccaccattcaccactttctcttcacaagctcaagttactgacaggcaaatctaacaagaaaagtagtctctgaagccgatccagtgccttgtgaatttggaattggtggtgaatttagatctaaaagccatagcaatgtcttttatcggtacccagcaaaagtgcaaggcttgtgagaa

SEQ ID NO: 53631 - DNA, 432 bp, Glycine max
  Clone ID: LIB3167-051-P1-K1-G11
cccacgcgtccgcccacgcgtccgcccacgcgttctcccacgcgtccggactagttctggatcgtcgcggcacccacacacacagttcgtcggaatgggaagggtgattcgcgctcagcgtaagggtgctgggtcggtgttcaagtctcacactcaccaccgcaagggtccggcgaggttccgcagcctcgacttcggcgagcgcaacggctacctcaagggcgtcgtcaccgacatcatccacgaccccggtcgcggcgcccctctcgccaaggtggcattccgccaccccttccgctacaagaagcaaacggagctcttcgtcgccgtcgagggcctctacaccgggcagttcgtctactgcggcaagaaggccaccctcgtggtcggcaacgtgttgcccatccgatccatccccgaaggtgccgtcat

SEQ ID NO: 53632 - DNA, 250 bp, Glycine max
  unsure at all n locations
  Clone ID: LIB3167-051-P1-K1-G12
actcacgcgcttattcataccaaaataaaaattaattttntactcctaaaaaaaanatgggggtggtttttttctctaatcatccatcaaccaccacctatcttatttattattntctgaaagatatgcttgtctctatctgctcaatccttcatcttttgcacctcgcaacgacaataatcaacgcttttgtaaccttttatcatgacaataaagatgctccaaattctttcctaatccaatatataac

SEQ ID NO: 53633 - DNA, 444 bp, Glycine max
  Clone ID: LIB3167-051-P1-K1-G2
cccacgcgtccggttaggaataggatggagggggttgagagcaaagaaagagaagtgatggtggcaggaccagttgcagtagtaggtgtctgtgatttgcttctgaggctgttggccttcacagttactcttgtcgctgctatagtcattgcggtcgataagcagacaaagcttgttcccatccagctttcagattcttttccacctttgaacgttcctcttactgctaagtggcaccaaatgtctgcctttgtgtactttctggtgaccaatgcaatagcatgcacgtatgcagccatgtctctactccttgccctcgtaaacagaggtaaaagcaaaggcttgtggacattgatcgctgttctcgacacattcatggtggctttgctcttttccggcaacggcgccgcttcggcagtcggtatccttggctacaaaagaaac

SEQ ID NO: 53634 - DNA, 435 bp, Glycine max
  unsure at all n locations
  Clone ID: LIB3167-051-P1-K1-G3
cccacgcgtccgagaaagggttgagctgcacaacaacctaagaatgggaggaagttcgagcttgagggatgagtataccttggaacaaaggctcggagaatcgcgggatattgtggccaaatatcccgatcgagtccccgtgattgtggaaagatatgcgaaatgcgatctgcctgagttggagaagaaaaaataccttgttcctcgagacttgtctgttgggcatttcattcatattttgagttccagacttagtctgccccctgggaaagctctctntgtatttgtgaagaataccttgcctcaaactgctaatatgatggactctgtgtatagatcattcaaggatgaggatggatttctttacatgtattatagcaccgaaaaaacctttggttcgtacatcatgtaaaatattaaactctgtacactatt

SEQ ID NO: 53635 - DNA, 376 bp, Glycine max
  unsure at all n locations
  Clone ID: LIB3167-051-P1-K1-G4
ggccactattaccctccaatttatgtgtctcctatacaccaatttttaaaccacaatggtttggctgaacaaccatcagctggcagcatgtatctaccagcagctgctgggatcaaatttcctggtccttcatanaaagnntggtgcgtaaccgtggatacctctcttttttttgtttattttttggaatttattaaaatatttttttcggctttatttcatcatttgggggtttttattattcttttatttgttttttctccctttttgttaaatttttttttatatttttcttatttttatatttttttttattcttttttttggggggcggggggtggttaatttttttttttatattttttattcttatttt

SEQ ID NO: 53636 - DNA, 492 bp, Glycine max
  unsure at all n locations
  Clone ID: LIB3167-051-P1-K1-G5
gccgatacaattgcataaaatggcgatctattcatccatgacagttttccatctcttnnggctgcccagccgtcacgcaacgcgtgtcggctagcgacgcgagaggtagatctagtgtgtagtgaaatgctagccagcaaattctgttgaagtgggaaaatggtcagttattgacaacaattggtagcaantgtcaaggaggaaccttgtatgttcgccacgtgcggcggctgctgtttgcttcttttgctgcagggnatggcanttggcnnagatgagcctaaaccaggtaacctcagaagtccaagaanaaagtattgccccggtttgtgtcaccaatcctacagctaggatttgtcgcaattgaggaacttttttgtttcacttttggaatttggaaatgtacaatgaatttgttgtaaggctttgatgatttcatttcatcctcactgtactagatgttcataaaagtatcgactttgcttcgtcgtc

SEQ ID NO: 53637 - DNA, 326 bp, Glycine max
  Clone ID: LIB3167-051-P1-K1-G6
ggcacaaaacccttaagccgttaagcaccttcaacgccgccgtagtttgttattggtttggttggatcgagattgatggtgagaggcagcacaagtttgatgtgaacctcttcaacctcatggctttcgattcctatcacaccttcccttcttaaccatctctttccagggaggaccttattaaacagtgtttactgaaaggcactcactttgttcaagctatcgcagatgccctctttatctttccatccaccgcagattttgttggaccccttaataccttgtttttcccacccacttaatagcctagggaaaaacattttttc

SEQ ID NO: 53638 - DNA, 442 bp, Glycine max
  Clone ID: LIB3167-051-P1-K1-G7
gagtttgttgtgagctataagctagtttatcgtgaggagaatatgaagttgtttgtttgctgtgttgctgcagtagggtgggtagcatggccatgccatggcgcaggctaccaaaggttccctctccgaatgaaaactggctatggtgagcgttcttcggaggtaaaatgcgcaagttttaggcttgctgtggaagcacacaacatccgagcctttaaaaccattcctgaagagtgcgttgaaccaacaaaggactacattaatggcgaacaatttagatcagactctaaaacagttaaccaacaagctttcttttatgctagtgaacgcgaagtccatcacaacgacatatttatattcggcataaataacaccgtactctctaatatcccatactatgaaaaacatggatattggggtggaggaaattaatgaaacctta

SEQ ID NO: 53639 - DNA, 345 bp, Glycine max
  Clone ID: LIB3167-051-P1-K1-G8
gatcggtgactgaggaatacagcgacaaagtaatgtgtctagcttgcaagctcatgggggtggggtcctaagcaatggggttagagaaagagggtttaagcaaagcatgtgttgacatggaccagaaggtggtggttaattactaccccaaatgccctcaacctgacctcactcttggcctgaagcgccacacggatccgggcactatcaccttgctgcttcaggaccaagtgggtggacttcaagccaccagggacaatggcaaaacatggatcaccgttcagcctgtggaggctgccttcgtcggcaattttggagatcatgctcattatctgagcaatggaa

SEQ ID NO: 53640 - DNA, 78 bp, Glycine max
  Clone ID: LIB3167-051-P1-K1-G9
ggattggcatcaaaccttgttttccattgttgctcatgtgtcaatttttaggttgttggaagggggctgattttgtgt

SEQ ID NO: 53641 - DNA, 374 bp, Glycine max
  unsure at all n locations
  Clone ID: LIB3167-051-P1-K1-H1
cgtgccgacannaatcttagatacanngttcttttagntggttattagtattatttctttgttatnaattgaagttntgagctgcgtacaattggagtgtttacgtaattanntcaaggtgaaatttttgggttctgatcnagagagtannatagtggtaactcttgagggtactctatctaagtttntgtattagatannaatattcgaagtgcnnaaataaaatgtgagaccttattntggaataattgaaagataattggttaagaatataacaatgtaagttcatgaatccacaaagcaattgtnngtgtgtgaagtcaaaggtttgagtttacctaagcttcagtttgttgtgttctttgtttttacct

SEQ ID NO: 53642 - DNA, 486 bp, Glycine max
  unsure at all n locations
  Clone ID: LIB3167-051-P1-K1-H10
acgcccacgccgtccggatnncgagataactagaaacagttgtgtatgaaaatgaaggtnccttggtggtctgggttgnctacaatttgtggtgagcatggcaatgnccatgccgtaccgatattgttcccttttctccgaatgaaccactggctttatggtgcccgtacctccggaggntgaaatgcgcaagtntggaggncttgcttgtggaaagcacacacacatctttggctttgagaccattccntgaagagtgcgttgaagcaacaaaggaatacatccatggcgaacaatatagatcagactccaaaacagttaaccaacaagcttacttttatgccagagacctcgaagtccatcccaaggacacatttgtgttcagtatagatggcaccgtactctctaatattccatactacaaaaaacatggatatggggtggagaaatttaactcgaccttgtatgatgaatgggttaacaagg

SEQ ID NO: 53643 - DNA, 432 bp, Glycine max
  unsure at all n locations
  Clone ID: LIB3167-051-P1-K1-H12
cggacgcgtgggcggacgcgtggcctcgcatttagtctttgcatctccgtcncattcggaatggtaaatccctttgcgggcacacatcntacaagctctggcagtgccttccgtttggtgttaaagttctcgcacaggtgcgagaagatggctgattgtgatgatgaacacgttaatcgaattggcgacttaccgatgaatgtgattgttagcatcctacaacgcctgcccttccaagacttagtgaagaccagtgtactggcaagggcatggaggtatatgtggtctgcgaccccacggcgtgaatttagagatgacttttttgagaagtgtaaccatcttggataccttgaaacttccgccattattactgaagctcttctttttcacaccggcctcatacacgtctttgcttgcattcctccttcgcac

SEQ ID NO: 53644 - DNA, 447 bp, Glycine max
  Clone ID: LIB3167-051-P1-K1-H2
ccaattcccaattcccaattcccaattcgaaacccttattcctttcaaagaaccaaattgagtgatggtgatggcaccaaaggcagagaagaagccagcggagaagaagcccgcggaggagaagaagtccacggtgggagacaaggctccggcggagaagaagccaaaggccggaaagaagcttccgaaggagggaggcgccggcggagaagggaagaagaagaagagaaacaagaagagcgtggagacatacaagatctacatcttcaaggttctgaagcaggtccaccctgacattggtatctcaagcaaggccatgggaatcatgaacagcttcatcaacgacatcttcgagaagcttgcccaggaatcttctagacttgcccgttacaacaagaagcccaccatcacttcaagggaaattcagaccgcggtcaggcttgtgct

SEQ ID NO: 53645 - DNA, 452 bp, Glycine max
  Clone ID: LIB3167-051-P1-K1-H3
ccatctcttgcttcttgcttctattacttgcttctttcttcaccatgtcacttgctgggaaaagcacgcgactgaaattggggttcatgcaaccgctgcaaagtggttcaacctctttgcaacacaacttcatcatgttcaaaaccttactgatagagtacatggaaccaagctgcatcaaggtgaagactggcatcacaacgagacagtcaaacactggacttataccatagatggtaaggctacaacatgtctggagagtattgaatccattgatgaacagaacaaaacaatcacctacaagctcttcagtggagacattgatcataagtataagaaatttaagttcacctttcaagccattgataaggatcaaggcggtgcttttattaaatggacggttgaatatgaaaggcttgctgaggaggttgatcctccatatggatacatcg

SEQ ID NO: 53646 - DNA, 447 bp, Glycine max
  Clone ID: LIB3167-051-P1-K1-H4
ggatcgtgagaggggcagtagccgagattccgtgagttgcaaaaatgaagacgattctttccggcgagaccatgaacatcccggacggcgtgagcatcaaagttcatgccaaggtcatcgaagttgagggcccccgcggaaaattggtgcgagacttcaagcatttgaatctcgattttcagctcattactgacgaaaacggtaaaagaaagctgaaaatcgacgcgtggtttggttctcggaaaacatccgccgccattcgcaccgccttgagccacgtggagaatcttatcaccggcgtcaccaagggctaccgctacaaaatgaggttcgtttatgcccattttcccatcaacgcaagcatcggcaacagcaacaagtctattgagatccgaaatttccttggcgagaagaaggtgaggaaagtcgacatgcttgatggcgtgt

SEQ ID NO: 53647 - DNA, 312 bp, Glycine max
  unsure at all n locations
  Clone ID: LIB3167-051-P1-K1-H5
gagatgccaaaaatgggtgtcatgtatcaatgattttttaatcatttgccgctaaanatacggtcagtgtttttttcaaatctggagggaacgcaacatccatnactgtaagcttcaagttcaaagcaattgcaccaagaaccatactcactttctacagttccttctaccataccagaattgatgactatggttctctttgtggccctgttattgatcaagttatagtgttccctgttgcctaaatattatagttccattccatctgtaccaatataatatgtattaatttagatttttgcaaatcacttg

SEQ ID NO: 53648 - DNA, 466 bp, Glycine max
  unsure at all n locations
  Clone ID: LIB3167-051-P1-K1-H6
cgcgtccgccgcccctcgtttcttcacactctgccgtgctctttcggctcaggtcaagagattcncaatagggagtgagaaaaaaaaatgagtcgaggaagtgcaactgctgcgaagggcaagaagaagggtgcgacattcaccattgactgcgcgaagccggtggaggacaagatcatggacattgcgtctctcgagaagttccttcaagagaggattaaggttggtggcaaggccggtgctctcggcgactccatcaccgtcgtacgtgagaagaccaaaatcattgttacttccgacagcaacttctccaaacggtacctcaagtacttgactaagaagtacctgaagaagcacaatgtgcgggactggctcagagtgattgcttttaacaaagatagaagcatntatgaattgaggtacttcaacattgcttgagaatgaatgagaggaagaagattaatta

SEQ ID NO: 53649 - DNA, 371 bp, Glycine max
  unsure at all n locations
  Clone ID: LIB3167-051-P1-K1-H7
caaagttgcttcctctatcgtgttctttgcgttagtttttgcagatcgaaaaatactggcatgattgtgttgtgcggttacagaagatnaatgaagaccaggagatgaaagatcaggcaacgccttcacacttgctttcttcagttcctccatctacattgcaccatttgaagggaatagcatcaattattgaaaccggttcgtactcaaaggaagttcgtcgaattgctcgtgccctgcgccttacatttgcatttaggcgtaaattgacaacaccaggtctctcatcttttcttgattatgttcttactcccgcttctgaacctcacactaggttatcctcttatcttcctaatcctaaagagggtgat

SEQ ID NO: 53650 - DNA, 419 bp, Glycine max
  Clone ID: LIB3167-051-P1-K1-H8
ctcacttgactcgattgcaagtgatccacgacacactgttcgcttcacaaaagcttcggatggaattcctcagtaacatcggcaagaagtcttctccttcaccatgccaccaaagcctttagactatgggtcaataaatgaaaacgtgaagaagagtcaatatgctgtcagaggtgaattataccttcgagcttctgagcttcagaaagagggcaaaaagattatatttactaatgttggcaacccacatgcattgggacagaaaccactgagcttccctcgtcaggttgttcctttgtgccaagctccattcctacttgatgatcctaatgttggactgctattccctgctgatgcaattgcaagagctaaacactatctttcattgacctcgggcggtttaggcgcttatagtgact

SEQ ID NO: 53651 - DNA, 142 bp, Glycine max
  unsure at all n locations
  Clone ID: LIB3167-051-P1-K1-H9
ggggcggcccacgcnnccgaaaaaaaaaacagaaagacaaaacaaaaaaaaaaaaataaaagacagaaaaaaaggaaaggacagcnaggacaaagggggggggggaaaaaaaaaaaaacnncccaaacaaaaaaaaacaaaa

SEQ ID NO: 53652 - DNA, 191 bp, Glycine max
  Clone ID: LIB3167-076-P1-K2-A2
tttctccaacaccttctccaacagagttccactttgagggtcccgctgtagctcctactagcagtgccacaacgtttcaagttggcctactcactgctcttggagttttggccatgtatgtggtttttctcaagtaaatgagactcacctttgcgttttggggggtctattattaggtttgtatgtgggtt

SEQ ID NO: 53653 - DNA, 285 bp, Glycine max
  unsure at all n locations
  Clone ID: LIB3167-076-P1-K2-A3
attccgcaacagagagtagaaaagatggcgcggctgatcacagtggtgtggtgcgcggtnncggtnctactgtgcgccgcgtcggtcgcgtcgtgggtggaggaggcggcgaacccgatacgaatggtggcgggggtggaggcggaggtggttcgggtgatagggcagtgtctgtgcgcgctgaagtttgctaggttcatgagcaggttcgggatgagttaccgaagcgaggaagagatttgggagaggtacttgatattttttcaaaaccttatgttcatccgc

SEQ ID NO: 53654 - DNA, 511 bp, Glycine max
  unsure at all n locations
  Clone ID: LIB3167-076-P1-K2-B11
aaaaaaaaaaaaaaangcgcgnnggaaaaaaaaaaatataaataaaaattaaaaaatttttttaaaaanaannaaaaaaaaanaaaaagnggggttaaaaaaaaaaaaaaggggggcaaaaaaaaaaaaaattaaaaaactaatcaaaaaaataaaaaaaaaaaataaaaaataaaaaaaaaaaaaaaacaaaaaaaaaaataaaaatataaaaaaaaacaataaaaaaaaaacaaaataataaaaaaaaaatataatacaaaaaaaaactaaaaaaaaaaaaaaacaaaaaaaaaaaaaaataaaaaaaaaaataaaccactaataacaataataaaaaaaaaaattaaaaaaaaaatagataaaatataaaaataaataaaaaaaaattaaaaaaaataaaatacaaaaataaaaatacaaatccaaaaaaccataaaaataaaaataaaatacaaataaaaataaaaatctaaattaaaaataatacatactaaaacattaatataac

SEQ ID NO: 53655 - DNA, 462 bp, Glycine max
  Clone ID: LIB3167-076-P1-K2-B2
cccacgcgtccggactcaactcaacaatggcttcttctattcagtgttcagtttgggttccttcgcttcccaacactaacaccatgcgctttctttctgttaacccaaactctgttactttctcttcttcttcccttaccagaatcagagcctcctcttcctccccaaccgtcgaagaagccgctatgaacatcgacaacctccgacgtttcatcaaccttaacttcggaaagtggaacggctctttctatcaatttgattcatgtgggaatatgttgcaacaactgagtaccaagctttctgctagctcttatggggaagatgaactcatgagtctcattcaaacgctgtatattaaacaaccttcatcaagtacttcaatttctggagatgacaatgatgcagaatgggcagagttcaaaattaaggaaaccaatatgtttactgttgacaaatatcaac

SEQ ID NO: 53656 - DNA, 450 bp, Glycine max
  unsure at all n locations
  Clone ID: LIB3167-076-P1-K2-B7
aataaacacacacacaaatatcaaatggctttctttatctttctcacctacccaactttgcccttcttcttactcctcaccagcgcctccatctaccntaccttgatcgaattcgacgaatattacactacccaccaattaggcccattccgccaaccacataaatgccatactgagtttcagcaagagcaacacctaatagcttgccagcaatgtatccgccagcaacttgctgtatcacccttcagctaaaaccattgtggttctcagcactgtccgactctactcaagcaatgctgcaacgagctttaccaggaagaccaagtatgccttttccctactttgaaacaagcatccaaatcatttatggtccatgtacagcactgaccatatcagtccactcgcatttaccagatcgctaagaacttctcaacttttgcaacattaaac

SEQ ID NO: 53657 - DNA, 387 bp, Glycine max
  unsure at all n locations
  Clone ID: LIB3167-076-P1-K2-B8
ggaanncccggggcggccgcacgcgtccgtagaaagaaacctcctccaaataaaatgttatattcttacatttaaagaataaacaaagggggctttctttaaacccactccgggctctctatctcttctgtttgtgttctctatccacattctttatctagtgagtgtggtggcacttctggtgttgctcaacaatgtctttcgattcagatattgctacaaacatcaacagcaggtagcctatgtctttcttgtactctgcttttccctctcattctcctactatttcctctacattgcacttccctttatttccatctttaccttcttcttctttaacgaaactttcaatttctctaaccaaacccaaattccttttcacctatt

SEQ ID NO: 53658 - DNA, 466 bp, Glycine max
  unsure at all n locations
  Clone ID: LIB3167-076-P1-K2-C1
gatactgggaagtgaagggaactttaactgctaaatagtgcccaaccattgaaggtggagtggcgcatttttcttcaaggcggggaaatacaaggcccanaagttgtgcctggaaccaacttccttcacggtgaaggcagagggtgtggccaagaatgccccgctcgaatttcagaacaccaagctcatgactcgtctgacctacaccctggacgagatcgagggtcccttcgaggtttcatccgatggaacggtgaaattcgaggagaaagacggaattgactatgctgctgtcactgtacagcttgcagggggagagcgtgtgccattcctcttcaccattaagcagttggtggcattctgggaaaccagacagcttcagtggggagttcctagtgccgtcttaccgtggttcctctttcttggaccccaagggaaggggtgccttaactggttatgacaatgc

SEQ ID NO: 53659 - DNA, 436 bp, Glycine max
  unsure at all n locations
  Clone ID: LIB3167-076-P1-K2-C2
cccgggcgccacgcgtccgcatgtatgattagtatgaatgttattattggttgcaactctgaattccacgggggattattaccagtttatcgggacccttttgattgtttagcacttgtgcaagttaataggaaggctttgctaaagcaacaacaaccaaatgaagtggaaggtttcgtttatgtctgtcactcaagcatgtcaaaaatgacaagtcctcattgtttatgtataatcccccttctccccttttttatttgtctctcagtagctcattttcagaattcgtacttgtaaattgtttgatttattgaggaagcacgattaactctctgcgcgggctaattttttgtttacaagtaatggcaaagtattggaggatagtagggtcaggtnnaaaaaaaaaaattttaaaaatatatattaatttaaaaat

SEQ ID NO: 53660 - DNA, 403 bp, Glycine max
  unsure at all n locations
  Clone ID: LIB3167-076-P1-K2-C3
aaaattgatataannaattaattnctntaattaatttcccccaacacccaaatccacccgcgaattatttaaaaaatatcggcgcccccaaaaaanaataacactttttcaaattaaaatcaatccttttctaaaacaacaacaaccaaatgaattctaaggtttcttttatttctttcactcaaacatttcaaaaaattcacattcttatttttaattattataatccccactctccccttaatatattttccttacaaaatcttcattttaaaaatcctactattaaattcatttattatatttattaagcacctattaacatctctcctccaactaattttatttttacaaattaatttccaaaataatttcaataattttattttttcctcctttattt

SEQ ID NO: 53661 - DNA, 473 bp, Glycine max
  unsure at all n locations
  Clone ID: LIB3167-076-P1-K2-C4
cggaanacccgggncggccgacgcgtacgcccacgcgtccggggtagccaagtttccattttgtttaagggcgcagcagcacccaaccggtgatagtgtactccatggccgagggcgccttccccaagtgggcccaaaaaaccgtcagcttgccccctctccggcgcggctgtcatcttgtcacttccaagatagtgaatgaaattgagcaagacctctccggcttcaagtgtggcctagctcatctctttttgcagcacaccagtgcttctcttaccatcaatgagaattatgactcagatgttcgcgaggataccgaaaccttcctcaatcggatagttcccgaggggtcatctgtcccatggaagcatactctagaggggccagatgacatgccagcttatattaaatcattgatgtttggttgtacactcacgataccgattacaaatggcaagcttaacatggggaca

SEQ ID NO: 53662 - DNA, 281 bp, Glycine max
  unsure at all n locations
  Clone ID: LIB3167-076-P1-K2-C7
tgctcccgccgtttactcaacatgattcatttccacccanccacgncnnccggtcagtncagatctttaacaggaggggggggcgggccccacaaacaagacccacacccaccaccgcaagggccccttcaaattcaaaagccttgacttcggcgaaagaaacggataccttaaaggcgtcgacaccgagatcatccacgatccaggacccggtgctccgctagccccagtggcgttccctcatcctttccgatacacgaagcataatgagctttcaccag

SEQ ID NO: 53663 - DNA, 71 bp, Glycine max
  Clone ID: LIB3167-076-P1-K2-D1
cgtccgcttaatggaaattaatggatgagaactaatgaataagctattgtgttgtgttgctttggtgagag

SEQ ID NO: 53664 - DNA, 423 bp, Glycine max
  unsure at all n locations
  Clone ID: LIB3167-076-P1-K2-D2
ccgggccggccgacgcgtccgaaccattgagttttgtttgctttgaaacatctttttcacagtaccccagaagatcnaacagggaggctttacaaagacaaaccggagttctcaactgtgttttacctctctctcacctactttcagaccatacccagggtttttgctttttctttttaaattagattcagttacattaacgaggctgagaagatgcagcatacaccgccaatgattcctatgatgccttctttcccacctacgaacataaccaccgagcagattcaaaaataccttgatgagaacaagaagcttattctggcaatatgggacagtcaaaatcttggaaaactttcataatgtgcccagtaccaagctcagcttcaaaagaatttgatgtatttagctgcaattgctgattcc

SEQ ID NO: 53665 - DNA, 420 bp, Glycine max
  Clone ID: LIB3167-076-P1-K2-D3
tgcaattattcctcttctcgcaatccgcactataaattctagggttccgaaatggacgctgacggggagatcaagaagggcgccggcggaagaaagggcggcggcccaaagaagaagccggtttcaaggtccgtcaaagccggtctccaattccccgtcggaagaattggccgttatttgaagaaaggaaggtacgctcagcgtgtcggtaccggtgctcccgtatacttggctgcagttctcgaatacctagctgccgaggtgcttgagttggctgggaatgcagcacgtgacaacaagaagaacaggattattccaagacacgtgcttttggcagtgagggacgatgaggagttggggaaattgcttgctggagtgacaattgcacatggtggcgtgcttccaaacattaaccctgtt

SEQ ID NO: 53666 - DNA, 406 bp, Glycine max
  unsure at all n locations
  Clone ID: LIB3167-076-P1-K2-D7
naataactacaccattaataaataacctacataactcattgcttcccattatctctatccagctaattttttaaaatatgagcggctcaccatatcattnnatcaacttactaaaaaaaaataataaataaagattattattaacttatgaaatctaatcaaaaattattcttataaatttaatgattaaataattatccaaaaaattcattattaattatatattattccaattttaaaaatctattatatcactttaataaaaacaatctttttttctattaatacacattcattcataataatcgggtgaatgataaataatatataaatttttttattatatcataaaactataatcttttatacaatcaataatttataatattattcttaaaaaatatat

SEQ ID NO: 53667 - DNA, 252 bp, Glycine max
  unsure at all n locations
  Clone ID: LIB3167-076-P1-K2-D8
aactacaccaataattattaacctanataactcatncctncccattaactccatcccgctaattattaaaaatatccgccgcccaccaaaacatcatatcaacttactaaaaaaaaataataaacaaatattactattaactcatcaactccaatcaaaaatcattcttataaattcaataatcaaaaaaacaactaacaaattcaatatataaccatatattatcccaactttttaaaattataacctcac

SEQ ID NO: 53668 - DNA, 261 bp, Glycine max
  Clone ID: LIB3167-076-P1-K2-E1
cgtccgcccacgcgtccgaattactactaattttgccattttttcttcatcttactcttaatcctctttggtttagtttaattgtgtgtcgcgttgaatttactgtgcagattgtgagacttgttgttgttaactgaacttttctgagcaagaatgtctgtgcgtgtaaagggaggcatggttttgtgaaagggttgatctatacttcactttatggtgcttctttatttcatttatgtgttttaccattccctttatttt

SEQ ID NO: 53669 - DNA, 265 bp, Glycine max
  Clone ID: LIB3167-076-P1-K2-E2
cggacgcgtgggcaaagagaagcattagcactaggagcagcaacaactagtctcagctgaaatggcctcttcagtgatggcatctgtggccctcaaacctgcccctttcactgttgagaagtcctcagtgagaggccttccctctctctcaaggaactcttcttcattcagagttgtggccagtggcaagaagatcaagactgacaaaccttatggaattaatggtggcatggctttgagggatggaactgatgcatctggcagg

SEQ ID NO: 53670 - DNA, 236 bp, Glycine max
  Clone ID: LIB3167-076-P1-K2-E3
aacaactagtctcatctgaagggcgctttttaaagataacaggggggcccctcaaaccttcccctttcacttttgagaagtccatattgagaggccttccctctctcttaatgaacttttcttcattcatatttttttccagtctcaagattatcaatactgacaaaccttatctaattaatgttatcataacttttacgattttaacttattcatttttcaacaaaaaaaaaata

SEQ ID NO: 53671 - DNA, 457 bp, Glycine max
  Clone ID: LIB3167-076-P1-K2-E4
cggacgcgtgggttgagaactaagaagaaggttatggcttcctcaatgatctcctccccagggtggaccaccgtcaaccgtgcgggtgccggcatggttgctccattcaccggcctcaaatccatggctggcttccccacgaggaagaccaacaatgacattacctccattgctagcaacggtggaagagtacaatgcatgcaggtgtggccaccaattggcaagaagaagttcgagactctttcctacttgccagacctcgatgatgcccaattggcaaaggaagtcgaataccttctaaggaaaggatggattccttgcttggaattcgagttggagcacggtttcgtgtaccgtgagcacaacaggtcacctggatactatgatggacgctactggaccatgtggaagctgcctatgtttggctgcactgatgcttctcaggtgttgaaggagc

SEQ ID NO: 53672 - DNA, 382 bp, Glycine max
  Clone ID: LIB3167-076-P1-K2-E7
gaggcatcttcacaatctccactcgttctttttcaccgcccacctactctagcttacgggggcgaccacctcagccgcggggggcgtcttctcaacgctcacctttcaccggatccactacccgtctttctctcccgccacgccgcctccgtcacagccttcgtcaacatcggcaggctcaagatagacacccagctcctctcccacctcccttccctccagcttctcgtctgcaccagcgtcgtcaccgatcacgtcgaccttgccgaatgcaagcgccgcggcatcgcccgcaccaatgctggcgacgccttctccgatgacttgtctgattgtgccttctgattgctgtagagcgttctccgtttattccggccggaga

SEQ ID NO: 53673 - DNA, 62 bp, Glycine max
  Clone ID: LIB3167-076-P1-K2-E8
accaagtaatcttcacaatcttcattctttcttatataccgcccacctactctatcatacat

SEQ ID NO: 53674 - DNA, 453 bp, Glycine max
  unsure at all n locations
  Clone ID: LIB3167-076-P1-K2-F1
cacgtgatgagttgtttcctggaggagaattttctaatcaaaatccacgtgttggtgaaggggtggctacatgggttaagcagagccgatctttggaagaaactaatgtagttctttggtatatatttggaatcacacacgttcctcgtttggaagactggcctgttatgccagtagagcgcattggttttatgctcacgcctcatggattcttcaactgttcccctgcagtagatgttccgccaaatgcatgtgaaatggattctaaagataatgacattaaggataatggttcttcgaaaccaattcagagtgggttaacggcaaagctttaggaacttgaccctccaaaagttatggctctgtgctgctgatatggagaaacatgagtactattctgatatatgtngttgagctcattataattttgaatctagaatattaataaagcta

SEQ ID NO: 53675 - DNA, 327 bp, Glycine max
  unsure at all n locations
  Clone ID: LIB3167-076-P1-K2-F2
cttcattcttctactgtctattatctgcttactaatatatcccaaaatgncgctcatagaagctgtttattaatacacagggcgcacccttcataaaaatctaattagtgtaactgctgacaatatcagcaccttcttaaaaactgcaaaggttccagtagactcttattgtccaacctcgtttgctaaactcgctcagaagaaaaatctttgcgattttatagcaaattcggcatgccgtgatgcaccagttgctgttgcagcttccccaattgctgctactgctggtggtgctactacctcagcttcaacttcttaatagaaaaa

SEQ ID NO: 53676 - DNA, 182 bp, Glycine max
  Clone ID: LIB3167-076-P1-K2-F4
gaccgacgcggccgcaagagatcatgatgaatacagtgtccaactcttctaatgtacaagttagtttggtggcacaccgatgtgtattttttagtgaagaacaggggggcaacaacaataataatgtggatcatcaattagtctttaatgttacatcctattacttaatctttccatttatt

SEQ ID NO: 53677 - DNA, 428 bp, Glycine max
  Clone ID: LIB3167-076-P1-K2-F7
aaacaagcaaaaaaacatacacacaaattttttatggcgaacaagctcttcctcctctgccgaactctttccttcttcttggggctcaccaacacctccatctaccgcaccatcgtgcaagtcgactaagatgatgccacaaacccacccggcccatttaggattccaaaatgtacgaaggagtttcagcaagcacaacacctgaaagcttgccaacaatggctccacaagcaggcaatgcattccggtagtggcccaagctggaccctcgacggtgagtttgattttgaagatgacatgtagaacccccagggcccacaacagaggccgccactacttcagcagtgctgcaacgagctccaccaggaagagccacttttcgtttgcccaaccttgaaaggagcatccaaagccgttaaacaacaagt

SEQ ID NO: 53678 - DNA, 69 bp, Glycine max
  Clone ID: LIB3167-076-P1-K2-G1
cgcgtccgcacgaacaagaagcttctggagtaagtggctttatacctcttccaagaggctaattaacaa

SEQ ID NO: 53679 - DNA, 326 bp, Glycine max
  Clone ID: LIB3167-076-P1-K2-G4
tttctaatatctcttccactgtacaccttcaacctgcggtgctttatgatgctgggtgcaccaacctcaaatccatggctgtcttccccactaggaagaccaacaattacattacctccattgctagcaactgtggaagagtacaatgcatgcaggtgtggccaccaattgtcaagaagaatttcgagactctttcctacttgccagacctctatgatgcccaatttgcatatgaagtctaataccttctaatgaaagtatgtatacctttcttggaattcgtgttggagcacatttttttattcccgtgatcacaacacgtcacc

SEQ ID NO: 53680 - DNA, 444 bp, Glycine max
  Clone ID: LIB3167-076-P1-K2-G7
aaaacccgggccggcccacgcgtccgcgcgtgtccattttttttttttcattatcattttctcatgttctatctttctttctcaggtggtaaatatataaacaaggtgggctaaaacaagtctcatctaatggctttttcttctcaaaacacatttgatgatacttttgatcaagcatttgatgatacttttgatcaagctttcgaggattttgctcttcaatattgtcatcaagaagaagaagaaaagaaaaaaaaagaagagtttatatcgaaagaaatcgtgaagaagacaatctacaattatggaatgattatttgagtgaaactctaacatatcctcataatctattccgacgactatttataatgaacaagccattgttcatgcatattgttgatcgcctttccaatgaagttgaattgtttctatacaagaaagatt

SEQ ID NO: 53681 - DNA, 394 bp, Glycine max
  Clone ID: LIB3167-076-P1-K2-G8
ccacgcatccacacatatccattttctttttttcatcattactatctcatcttctatctttcttcctcagccgcaattttataaacaattgggggcccaacaaaactcatctaacaactttttcttcccaaaacacatttcataatacttttcatcaaccatttcatcatactcttatatcaacctttcttacatcttcctctccaattctttcatcactactaacattacaaccacataattttaacatttcctatcttataaaattttcaataacacaccctacatttttctaactcttcattttctctaatctcttaccattatccccatatttcttttactcacccccctattttatcaactcaataatcccttatcttcattccatatt

SEQ ID NO: 53682 - DNA, 429 bp, Glycine max
  unsure at all n locations
  Clone ID: LIB3167-076-P1-K2-H1
cgtccggggacgagtcgaaatggctgaatcagagagttttcttattcctcaagtcaaacttgnaactcgaggccttttttctttgaagcgcgtacctacanaaaagatccaggtatccactaaattttgcgttgcagtagcaaaatttcctaattttcaaatcaaagggacaccgtaatatttgcggtcgtgttgtgaaacaagcttgaaacgccttgatgttgaatacattgatctctattatcagcacaggattgaccaaacagtacctatagaggaaacagtgggtgaacttaagaaacttgttgaagaaggtaaagtgaagtatatagggttatcttaagcgagtccagatacaataagaaaagcacatgcagttcatcccatcactgctttacaaataaagtggtccctattgactcttgacat

SEQ ID NO: 53683 - DNA, 283 bp, Glycine max
  unsure at all n locations
  Clone ID: LIB3167-076-P1-K2-H10
aaactaaacatttatttttccattttttataacncaaccaaccattttcatcagcccgcatattttaaaaaaaacgtgggccccaaaaaacaataatattaacaaaactattccttccaataaaaatcttttaacccatattacaactatatccacaaccacatacaattccctatcattcacatcaacatcaacaacatcaacaacaacaaatatctacttacttattctactatctactctcactattcaatacaaaaacattatcattttcatttcaacc

SEQ ID NO: 53684 - DNA, 90 bp, Glycine max
  unsure at all n locations
  Clone ID: LIB3167-076-P1-K2-H11
aaaaaaaaaaaaaaaaaaaaaaaataaaatattaaataaaannnanaaaaaaaaaaaaaaaagggaaaaaaaaaaaagaaagntgcaccg

SEQ ID NO: 53685 - DNA, 305 bp, Glycine max
  unsure at all n locations
  Clone ID: LIB3167-076-P1-K2-H3
aacaaaccaaaangccttaataatgtcggcatttttataaattgtgcgtgggacatacaaaaaaaacattaatattaatgatttatatagttttagctctctcatcataccccacaatgacagtgagcaagtttttttcaaaatggtcacttagattattatctaggttctcaacatgaccttctcctctgacatatgcttgtaagtataaaccaagcatttcaaacatatcaagtcttccattcttaatttcctttacctttatcattgcagcttggtctggatcattattataccctaatttt

SEQ ID NO: 53686 - DNA, 56 bp, Glycine max
  Clone ID: LIB3167-076-P1-K2-H4
cccacgcgtccggtgagctataatctagtttattttgaggagaatatgaagttgtt

SEQ ID NO: 53687 - DNA, 240 bp, Glycine max
  Clone ID: LIB3167-076-P1-K2-H7
cgtccggttccaacaactagactatcaaagacgcaataattgagcacgggacaatccttaacagccgtattttaataaaccagtctcgacctctaaaacactctaatgtccacaatgaacataactggtcatctaacattcttaaaagaacacttgtgatgtttgcaataaaaatctacctatacatagctataacaatctacattctatctcaacaaacctgttatgagaacatttcat

SEQ ID NO: 53688 - DNA, 282 bp, Glycine max
  Clone ID: LIB3167-077-P1-K1-E6
cccacccgtccgaaaaaaaaaaaaaaaaaaaaaagggggggccgttttggaggatccaggtttccgtccccgtgcttgcgacgtattagtttttttttggggtaccctaaattaaattaacgggccgcggtttaccaccgtcgggccggggaaacccctggcgttccccaacttaatggcctggcggaacatccccttttggccggttggggtaatagcgaaagggccggaacggatggcctttccaaccagttgcccagcctgatgggcgatggggccccc

SEQ ID NO: 53689 - DNA, 432 bp, Glycine max
  Clone ID: LIB3167-077-P1-K2-H5
gttctagatcgcgagcggccccctttttttttttttttttttttttttttttttttttttggtttttttttttttttggggggttgtttttatttttttttttttagggcacccccaaattaaaattttctttttttatttttaactttaaaagggaaaaaacacaaaaacaatttttgtttttccccaaaaattttttattaaaatttgtgactaaaaataattttatgcttcagtttttttcttccttccaaaaaaggattttttacctttacttgccaacataaaaacttataatgggaaacttaaaataaaggtctttcttccccccctttttttttaaattaaaaaatttttttttgggggaattaaaaaaaattctacaatcccctttttttttaatttttaaaataaaaacaaatatttttccca

SEQ ID NO: 53690 - DNA, 461 bp, Glycine max
  Clone ID: LIB3167-078-P1-K1-D11
ccggctcggaattccgggtcggaccacacccttccggtacctactgggaaaataagggggtattatttttgaacataacatataacaacggggcggggtagttttaaggttgcctgagcaaaatttgggtttatagattgccggggatttgggatggtttaattctttagtggttaactattttttccattgtttaaatattattttttaagtgtaaattctaatattgccttgtgtagtattagtctctttatatttatggattttttttgttttattttttttctttctttttttatttttttttttttaattttaatttatttttgggtgttggtgtgtttgttttttttatattttctcttttattaatttttcttatttatactattattttattttttttgatttctaaccttctttaattttttttaatttttctctttagttatttttttttt

SEQ ID NO: 53691 - DNA, 379 bp, Glycine max
  Clone ID: LIB3167-079-P1-K1-A1
ccccccgtccggtttttatccaattgaaattttaaaaatgcctgggttaaacttaagaattcaatttttgaaatggaataagtaaccaatttaattggattgggcgaaggggttcaaaaaaaaggggtcctaactcccattttttttttttttttgaattaaccgatcaacttgctttgttttcgaacatttttttttgatttcaaaaattttccggaaaaaatttgaatctttttttttttgcggaataatcctactacttttggtcctggggtttttggccttgaaaaaaaaaatttggggcggttggcccaaataattggtccgcgcctagatgaagcttttcccccaggtaagatgcctaaattttacaaccctt

SEQ ID NO: 53692 - DNA, 424 bp, Glycine max
  Clone ID: LIB3167-079-P1-K1-A10
ccaacgcgtccgaaagggtttaaggtgttcctgaagtccaacgaaaaaacgtggttaaggtcggggaagtcgaggccagtttttgagccataagtttggatggtaaatttaagggccaggcttggttgggaatttggataccaggtccttaattttaaaaatcaatccagttataattgtaatggctttactagtaaatgggggggaacttatattaggtaacaaagttttttgcttaaaaaaggaagtgaagaaattgttacaccttggtttccagcactggcataaatactggaattgagcggaattaatacggccttcaattttaaaaatgaaggggggatggccattttttacagttagcattaatggttaggattgggggttatttgcctttttggcattaatggaatttatgggttgg

SEQ ID NO: 53693 - DNA, 393 bp, Glycine max
  Clone ID: LIB3167-079-P1-K1-A12
acacccttccgccaacccttccgaaaccactaggttaatttttaacccgaagacttggaagaccttccgaggggcaaatttttgtttagaatggaagggcccaacttttttattataccatactacaaaaaacttgaatttggggggcggaaattaacttcgtcctatttttaggaatggatttaaatgggccttgcaccaatctttccttggaatttatggataaccacaaggctggcgcctattgattccaaattgtttttttgacctggagtaccacggaccaaattggcattaacggagcctactttaaagagggttgcttccctaacatggaaaatttaatttaagggatctacaggaaccttcaactcaaattctactttcttccaa

SEQ ID NO: 53694 - DNA, 383 bp, Glycine max
  Clone ID: LIB3167-079-P1-K1-A4
cttttggatccctaatgtttctaaaatccgaaatcctaattccgttgggggaaaaaaattgttgggggggaagggagtttggttggaaaaggcaggggtcctgttttcggaatcgattggggaccgacgtacttttgcgtcggcggggggcaccacgaccgggtggaaatcatagccaacgatcagggtaccagaactaccccatcctacggggttttaaccgccccaaaccggttgatcggcgatgcggcgaaaaaccaggtccgtttgaacccaaccaacaccggttttgatgctaaccgttggatgggaaggcgtttttccgatgcataagtccagggggccatgaaatgtgggccgtccaaggggattccgggccctgt

SEQ ID NO: 53695 - DNA, 213 bp, Glycine max
  Clone ID: LIB3167-079-P1-K1-A5
gggactattcttgaaagggttgattgtttggtccaaaaaattcaaaaggacatttcgatggtgggggaagggaaaaacattgggtaagaagggtttttggttgaaacgaacttaaacttgctttaaaacagttggggtaagggaactttttggcttgggaaaaggaaggctttccaatttgttccagcttccggataaccctttttcatcctt

SEQ ID NO: 53696 - DNA, 358 bp, Glycine max
  Clone ID: LIB3167-079-P1-K1-A6
gaaaaaaaaaggcttccacaaccacattttttatgggcactaaggatggggcttttttccggggccaatgcattaaaacttttttttgtttccaaacctaatttttggcctcctttttttttttccaaatcctaattttccgtttgggttggacttaagtcccctgattaacatgaatgggtcaagcacgaaggctaagtcgccaccattggtttaactgaccatgcccaggaccaatttgggaaaggttgtgtttgtggagctgccaaaaccaggtggcacagtttccaagaagtctggcttcggagccgttaaaagttttaaagcaccaagtgttataaactttccaatttggggg

SEQ ID NO: 53697 - DNA, 322 bp, Glycine max
  Clone ID: LIB3167-079-P1-K1-A7
cggccggaatgccggggccgccccacccgtccggttagggttaaccggaagctcctgcacctttgggggaaaaattttgtacgctaaggaagaccatttttaaaaacctagatgtcaatttttcgaggaaattatgggcataggctccagcagcgccaaattggtcctcattttggagggtttcaacagttcgttggccggaaaaccccaggcttaggcccgatgcctggccttttttggtcatgccaccaaagttgcccctgtgggggaccttaaaacaagcggtccctgacctttgacctccggcgatcaataatcaatg

SEQ ID NO: 53698 - DNA, 283 bp, Glycine max
  unsure at all n locations
  Clone ID: LIB3167-079-P1-K1-A8
gggaatgaaaggcccggcccgcccaangcgtccgccaaggcgtccggtggaaactggttctttttttttggttctgggttggggttggttttttttttaacctgaaaaggtttggttgcgggggtaactggggttgcggaagttcctgcaggtgcggaaccggttgcgggggttgcaggatgtccccagacttgggctccactgagtaaaccaccaccgggaccttggtcatgggaggggcacctgttaaggttcaatttgggggggctgaaatgggtgtgcc

SEQ ID NO: 53699 - DNA, 425 bp, Glycine max
  Clone ID: LIB3167-079-P1-K1-A9
cgggccgaaattcccgtccgaccccccttccgcccacccttccgccaacccttccggaaggagtgaaatcaaagaaaggaaggagcctttgggggtaaaaggaccgaaggaaagagagttgccttcgggttgggaaataacaggaaccaaaggtcgttgttccaatttttgattgaatttaaccaaggccttgtttcgttgccaaaagcccaaggcctgtctttttttccggaaaaactacctcagggccctccacctttccagggagttcaaccgccaaacccgatttaccaggggggaccaggccaaactaaggcttgtttccagaaagggccaggaggaggggtttattgaccataacaattaccccctgaggttatttttcaattaaagcttttgaccatttttttttgttaaaccgattg

SEQ ID NO: 53700 - DNA, 341 bp, Glycine max
  Clone ID: LIB3167-079-P1-K1-B1
gaattccgggtccgaccacaggcgtccgccacacgcttccgccaacgcttccgccaacccttccggggggatgggtaatttttatgtttggaactttgatggagtaatttgggatagctggggtaagacagttatttttgtttttaaggttgccaaatggagatggcctccctggttggatggggggaattaaaccataaaagattggatggttgcccagttaattccagtccggccggggggggaaacgggttttgaaaccctttaactgggaaggtggttgctggggactaaatttccatccataaagaaatttttattttcggaggggcgaaatgtgg

SEQ ID NO: 53701 - DNA, 401 bp, Glycine max
  Clone ID: LIB3167-079-P1-K1-B10
acacccttccggttgaacaggctttggaataataatatttttttaccttttaagccggggttccaagagaagggttgggacaaagataactccaatctcaattgggtttttaaggaaaagcctcttttttggttagggcagttgttattccccttgtaaggcagggatcagccagcctttgggggttggcttaaaagcaaagtttttcttactgggatggcagctttccggtggactatggatttgaccttttggaactttcggaccctgaaggaccaggggggttcatggacccgaatgggttagcttagggggggatattcaatggccgttatccaaggttggtggcagttggggcaatagcacttgaatttttagccagggttggtttgttccttaag

SEQ ID NO: 53702 - DNA, 366 bp, Glycine max
  Clone ID: LIB3167-079-P1-K1-B11
ccaactcgtccgggggttttgccggtttcatatggggtggggggtccaattgggtggtgggccaaggttaatgtaatgggaaatgactttggtaataataagttaataagcaatgggttaaatattaatgcagggatggagccatttgcattagaaccaaacaggcttttaagggggtttaacccaattattaaacttttttatcctaactccagggccacattaaatttaatgggctttgttgggcagtccttgattaacgcaggtggaataatggagcaaacatttttgcctggaaaggactccattgaaatgtcatcaattgtttacaagaatggggttttaactgaccaagcattaccagtt

SEQ ID NO: 53703 - DNA, 259 bp, Glycine max
  Clone ID: LIB3167-079-P1-K1-B12
aaaacccggccgcaccaacccttccttttattaaaacccttttatttacttttttttttaaaaaaaaagacttcccaacatagcgcgcgggttttttcataaaaacctcccaacctttaccttcctcccaaaaaacaaacctatccctaattttcccttttttaatttttttcttaaccaaatcctatttctttcctttttcatttattcctaatcgtttccctcccaaattcttacaacttcttaccttaatcattta

SEQ ID NO: 53704 - DNA, 382 bp, Glycine max
  Clone ID: LIB3167-079-P1-K1-B2
cggggcggcccacacccgtccgcccacccttccgattggggaaagtcttttgggaaagggaacctttgaccggaaataaatgcggggctttattgttggagttggtggaaattccacttgaaaaccgggtggttctttaaactccagtcccacccacggttggaatagcctttttatgtaccatctttaatatggataatctaaaaatccaaatggccttttgcaccctgttcaatattggggaatgataaaggattctaccttacttttccatttttggtggggtggccaaaggccaccagaaggtttgtttaaaagagaaacggtttttagggtaaaaattggtggtttttttacgtttttaatccagggtacctttaat

SEQ ID NO: 53705 - DNA, 425 bp, Glycine max
  Clone ID: LIB3167-079-P1-K1-B3
ggaatttccggggcggaccaccccgtccaaccaatagttttttccttagaacctaaggatttgttggataggccatccttaggggcattatatccgcccttttaaattaattagcagaaggggggttgcgaattaaaccatagccttttgtgcattgtgtgttcccaacaccgcagtttagcctttgggggcatcagcaatcccatggggatcagaatttcattcagcatttgaggatcaggggcatcaggcttaggctagcaggcaatgatttggcttttttcccagcaaatttaatgctccaaacccctaaccaggatgcccataaacctccaccttaattaaactaaatattaacttaatgggcacctaaagagtaccatggggggggggcatccttttttggcaggggatctatgtcattt

SEQ ID NO: 53706 - DNA, 169 bp, Glycine max
  Clone ID: LIB3167-079-P1-K1-B4
gatttcccttaaacccgattgcctttttgtttccgaggaaaatgcgtttaaaaggggcgtgggaactttgaaggggggtgatttgaatggggggagggggttccccaggggctttctgaggggccctctggaaaacaacctttttttttaagtttttacaaggattttt

SEQ ID NO: 53707 - DNA, 145 bp, Glycine max
  Clone ID: LIB3167-079-P1-K1-B5
cccacgcgtccgccaacccttccggaggggttcttaatttttttaatcggatggaccaaatggtccacttggaggaagaaatttcacagggttagggttgccgagcccattgattttgaggggccagttggccagtacttgttcg

SEQ ID NO: 53708 - DNA, 403 bp, Glycine max
  Clone ID: LIB3167-079-P1-K1-B6
tgggttcggttcggtccttttttttactaccaccaccttcggaatcagaaccaccatgggccaccactaactgggaggaggttccctttttggatttaatgactgacctctttcgtggtttaaggggcttttccaaacttgccaggcgtttaattttaatgggcccacctggatctggaaagggcccccagtccccaatcttaaaagttgggtcctgtttatgccacttacttcccggggatttgttaagagcagttgtagcagttaagacccttttgggggtcaaggttaaagaagttttggttaagggagaacttgtttttgatgactgggttgtgggctttttggatgaagcattgaagaacccttcttgtcagaagggtttaatttttgatggttttcc

SEQ ID NO: 53709 - DNA, 225 bp, Glycine max
  Clone ID: LIB3167-079-P1-K1-B7
acacccttccgccaaggcttccggaacttacaaaggttaatgagatttagcggcaaaacaaacggggaagggaactttaaaggtcccccaaaaggtttaaaaggaatcctaaaaacgattgttccagcaaacggaaggaggttggttcacagttccattaattggaaggagttcggttctggtttactttgtttccaaggcttgggaaatggaaaaggcaaagaa

SEQ ID NO: 53710 - DNA, 333 bp, Glycine max
  Clone ID: LIB3167-079-P1-K1-B8
ggggtaacttaaaacgagggaatgggattgatgatcgttgttttctccagtgttaccaaccggaaaccttgccatggccggcctggcggtttgttccaccggcctaaaatccatggttggtttcccaaccggtaagacgaaaaatgcctttacttgaatggttggtaacgagggaaacagcaattgcgggttgggggggctcccaatggggaggatgaagtctccgattgtttccttcttggcggaccttgttgatgcccattgggaaaaggaggtccaataccttttatggaagggatggatccttggtttgaattccagggggaaattggg

SEQ ID NO: 53711 - DNA, 415 bp, Glycine max
  Clone ID: LIB3167-079-P1-K1-B9
ccaaggcttccgaaaaaaagaaaggaatccatacccgtgggcaaaggcattggtggggacctgttacagaaccttggcaaccaacaggaacggtttaccgaattttaacaagaagggttccatgctaactttgaaagggcaaaaaacccaaggcgcttcaaaaatcgtggcaaaactaacctacttcctttttaagaagggccacaattaaatttcaaccgtggacggccatccttccggggtaaacgccggaatgctcgatttggaaagggaaaactttaactttgccgggaaacagaaaattttaaagttcaaccaaaggttcaatttgatcccaacacttaagggaacctataaggggtggatggacttattcggataaaactttgccggagggggtcatttgaccggaagg

SEQ ID NO: 53712 - DNA, 427 bp, Glycine max
  Clone ID: LIB3167-079-P1-K1-C1
ccaacccgtccgaatatagcccaagccctattcaaccaaaccttaacacacacccatttggtgcaggttcaatggttggcctaaaggtgccattttgggttgaagggttttgaatggttgaggggggggcacccatggcacatgcagttttaacgtccggccaggtgacaggtagcctgcccaattgcatcggttacctccagaagggaggaacgccgtcgtcggaatgctgcaacggagggaaaagcctaaaggccgccgccaagaccaccgccaaccgcaaaacgggttgcaactgcctaaggtcggccgccagcaaaatttccggtttaaacgccaacaacgccgcttggttcccggggaattgcggggtttccatcccttacaagatcagtactttaaccaactgcgttacaatcaaggtttg

SEQ ID NO: 53713 - DNA, 123 bp, Glycine max
  Clone ID: LIB3167-079-P1-K1-C10
aaagggaacgcgccttgtagcggggcattaagcccggggggttgtggtggttacccccagggggaccgttacatttgccagggccttagggcccgttcttttggtttttttcccttctttttt

SEQ ID NO: 53714 - DNA, 377 bp, Glycine max
  Clone ID: LIB3167-079-P1-K1-C11
ccaacccgtccgttggttttaaggttaaaccagaccgggttatgattccccaaggggggcggacaatggaacgtggggttggaaaatttaatccttaatttgggaggggttattaatgcgattataacggtggcctggcttttatataattggaggtggtggaaccgggttttgatttaataaaaggagggcccggattttttaatttaattttaatcaggagaccatgaaccatattggaaattttggttggcttccttacggtttggattaatatataaatggaattgattggggagaaaaaaatttcttagggtttttgcgtaattccattctttttaaaaaaaaaaaaataaataaaaattaaaaggggcggc

SEQ ID NO: 53715 - DNA, 386 bp, Glycine max
  Clone ID: LIB3167-079-P1-K1-C12
attggaaaaccctttgaaaatcctttttttttttaatggatcattttttttttttggggcggttaaaatttccgaccttttccgttccaattttaatttcctggaccaaacccaacccttaccctttttttttggtttgatcccggattcccccccaggggcgtagttttggggtcgtttggtaaattttttcggtggttaaggttagattttttggggaggtttttggggtttggattcggtgggttgattcccaccaccaccattggggcggggtcccttcccggattggggttgggtggcgggggtttaattccaaacctgggccagaccccgggcctgaaccagaacccgaacttgaaccagaataattacccgttccaggt

SEQ ID NO: 53716 - DNA, 432 bp, Glycine max
  Clone ID: LIB3167-079-P1-K1-C2
ccacacgcgtccggtaatgtaaagggttgaaattttaattgttgtaggaattccaattttcggccaacgccatttaaaacaacatttaacggaacctttttctttttctttacgcctcctaaatttggcaaggatggaaggaggggagatcagggggcaggtagtagggggggattggggggcaaagaaaaaggttttggtggttggggccattggtggcactggcaaaagaatcgttgggcagttactggcaaagggtttggttgttaaggttggggttggggccatcgccagggccaagacacccttttcttttgccaaccaattttttaaaatggggaaggctgatgtaacagagggttttgttaagttagttgaggccatgggggacgattaaaaagcagtagtttgggccacaggttttcgcccggg

SEQ ID NO: 53717 - DNA, 426 bp, Glycine max
  Clone ID: LIB3167-079-P1-K1-C3
tcccgggcccccccaaccctccggaaaggttggcctttccggggggggggagggggggaaaaaatttggtttttttttggggggggcccaagggttaaaccggaaatccaaagaagggggtgggaaaaaaaaattgcatttttttttgggggggggttttgaaactttgatcttgggaaaacccaaaagggaaaccttcggtgccccttggtagataaattagaggggatttttgttggtgggtttttctgggaacccgtgttggggaaatgaccggtggtattgaggtctgggcacttccggcaagtccaccgaagccgttgaagtggaaattttcgcaggttttcggggaccgtccggcggggagagaagttcaggaaggggttttaatttctgttttggaatttgccaggtttggtgatcatt

SEQ ID NO: 53718 - DNA, 431 bp, Glycine max
  Clone ID: LIB3167-079-P1-K1-C4
attccgggccgaccacacccgtccggtttttttcttaacactccgcctaactctcttttatttcgttcctttattccttacgtcgccgtaggggtcgttttcggatcgggggaactggactgccccggcgtgaattccgaccctgcaagggcgcaccgaattgcgatggcggggacaaatttgaaggttttcgttaagactttaaaaggccctaacttcgaaatcgaagggacccccgaggaccacgtttttgaagggaagaaaaatttagaacctgttcagggtgcaaatgtttatcctgctgaacagcaaatgctaattcatcaagggaaagttcttagggatgcttttaccttggaggagaataaagtggtggaaaatactttcatggaaataatgctatcaaggagtaagagcccatccggggaagg

SEQ ID NO: 53719 - DNA, 395 bp, Glycine max
  Clone ID: LIB3167-079-P1-K1-C5
cggggccgaccacacccgtccgaaaaaaacacgtccgtttggtttcgttcccatgggggcctccgtttccgcgtcctccggggtggctgtttggaactccgaactttcaacccgctggccaccttaattggcttccgaatttttttccgccaggcaatcctttttgcatttcccgtcgggcccccccctttttcggattagaattcaacgcgctccggttcaatggggacctggattccttcttttggttcaagcgaggaaccaaacctataactggttggacgattggctggccaattctgagaaactctggtgggtggacttttatgcaacctgggggggccctggccaattaatggttcccatcctcaaggaagtaagcactcggtttaagg

SEQ ID NO: 53720 - DNA, 127 bp, Glycine max
  Clone ID: LIB3167-079-P1-K1-C6
tgaattccggggccgaccacacccgtccgattgggtcccaaataattaggttaattcaagagtttaaatggattatgaatttggggatgaaatggtttaaggcaatctggttcgtccagtttagatt

SEQ ID NO: 53721 - DNA, 414 bp, Glycine max
  Clone ID: LIB3167-079-P1-K1-C7
acaaataaaagccagggccacctcaaacttttttatggttttttccgcttccttagggttgttttgggggctactaacaaaggaacactcaaccgatcccgtttttttaaccttaaacaggttaaaccaagtcaaaccaaacattatgctcaaaaaggaggctggattttaatccttgggggggtaccaactaaccaaagtgggcagaaccggcgggccaacttgggaatttttgggcggggcctttaacgctgcccaaatccaaattggggccagcaaaaccggcaaggtagccagttgggttacatcctttaaattaaacattttcgaacccaacaaataaaactaagttgacgggctggcctttttttgggaacccgtcgggtttaagcccaaatccgacgatggattttt

SEQ ID NO: 53722 - DNA, 274 bp, Glycine max
  Clone ID: LIB3167-079-P1-K1-C8
gattaatgggggcagttccaaaatccattttgtccgaaccaggggaaaaatccgtgggttcataaccggggaaaaggttacccaatggcaggctttccagggcaggattggaaggaggggatgggaagaagggccaccagggccttggcaaatttaattcttttaaatttttttccatgccttaaagggcattagatggttggttattaagtttagggcccaactttcttttttggggttggccactttaaggtaatcctggtccccttttttt

SEQ ID NO: 53723 - DNA, 352 bp, Glycine max
  unsure at all n locations
  Clone ID: LIB3167-079-P1-K1-C9
acgggnccgaaattccgggccgaccacacccgtccggtcaattccaactttgcgttttaagggtttcttgaaaaaccatgcaaaactgtagggggggaggcttgattggcggaaatgtcccctgaaccgaacttccagccagaggttaaaattcaacaggtcgttccagaaaccgttgaaggggagattctggaatccgataatcttaaaccggtttttcagggaaaggtttgggatgatcttgggggaactttttgtgagaccgattttaagaggggggtttattagggaaatgtgaaaccctttttaattgcaatgactactgcgttttaaaggtaaacaaggagtaatt

SEQ ID NO: 53724 - DNA, 413 bp, Glycine max
  Clone ID: LIB3167-079-P1-K1-D1
ttaaggcactttttggttttttttttaaccttaatatccataattttccacaccaatggagggttttttgagcaatcaatattcaagttccccacagcccaaccaagggtggggaacctgccccacttgcattttttttaccacgccattttaaagggcaggaccataacgggggtgaaaataatggagccatcagcgggcgaggttcgggaagcaactgggtttggaaccactttaatgatggacaatgttttgaccgagggtccaaagctgacctcgaagcacgttggaagggttcaggggctgtttggtttggcctttttggaggaccggggaatggggatgctaattaactgggctttcatggagggtgagtttgttggcggaactttaagaatgctgggggggaaccc

SEQ ID NO: 53725 - DNA, 333 bp, Glycine max
  unsure at all n locations
  Clone ID: LIB3167-079-P1-K1-D10
aacgggncggaaatccccgggccgaccacacccttccgccaacccttccgccaacccttccggtttagttttgggggaattaaaccattttgtggtggttattttaaaggaaggtgtgccccttaccaacctaacaaaaggaatggaaaagtggttcccggaaattgtgcctgccaagtcttttaattggggccaggactttaaaggcttaattttttggaaccagggtttaactaatccattttggttgcctttaaccatgaaggaagatttttttgaattaaaaagcaacccaattaatgttaagtttttaacatatttttttgaaatttt

SEQ ID NO: 53726 - DNA, 361 bp, Glycine max
  Clone ID: LIB3167-079-P1-K1-D12
caaatggccaaagtcttggaatcggaaattaaaagggggttgctggacagggactacaacaaccaacccccggcccaattttacaaccccgccaagctccaaaggtggacctttttccaagccttaatcgccaagttcgtggcaaccctctttttcttttacttaacaatcctaaccgtaatcggttacaacaacaaaacagccaccgccgccaagccttgaagcggcttcggcgtcttcggaatcgttgggccctttgaaggcataatttttgccctcgtttatggaaccgccggcttataagggggacacataaacccggcggggacgttcggttggttttagccaagaaaggtgtcct

SEQ ID NO: 53727 - DNA, 433 bp, Glycine max
  Clone ID: LIB3167-079-P1-K1-D2
gtccgccccctcggccgggcctggttcgaaccgggttcttgtgggggaccaatctttccgaggttgggtttggggcctaaaaattaacccctggggccacaaaattttacgttaaggcccctcgctttgaaccaggaggggaagggatcgccttgtttttgcccctggcaattaattcgaggataattccgttaagggtggttgcggaattggctatggggctggttccaaccctcattcctaggggacctccagcccgctggtttattggcccgctccttggacagtcactgaccaccaatttggattgtgcttgtttggaaggttctccaggataccaaagggtccagggcgggaaaaagcggagatgattatttaatttgggggcctcttgaggaggctgaagggggaaacttttaatggcaccaggttt

SEQ ID NO: 53728 - DNA, 392 bp, Glycine max
  unsure at all n locations
  Clone ID: LIB3167-079-P1-K1-D3
gcccgagataaccttagagccgagggattttatggggcaaccaaccaaaaaattagggccaaggttaattgaaattttcccggggggggacgcgaactaccttaacagggctttaatggggtgggtccggaaggacgtgatcaaacattgaaccgcccttaaggggattttccagcccgggttgccaccggagaaaaaggtcccggggttttggttttccacagggttaaaaattgggaccagttcaataacgttggccttacgcttggccaacctgtacttggggggtttaaggaccccggccggggtgtggttgagttctttaaggccggnaacaccaacttcttgggggacaaccccaggtggttgggttttgggggcgggtcccagga

SEQ ID NO: 53729 - DNA, 389 bp, Glycine max
  Clone ID: LIB3167-079-P1-K1-D4
gggggaaggccgaggcactgaaaataaggggggttttttaacggttccaaaggttggtgggtgttggatttggattccactttttggcctttttactgggagggccggtcgaagcacgacacgccttttttgtttcaacattaaaaagggatatggcttgcactaaaccaggaaaggatggatgtggccatggtttccaagtggccaactccggacatggaaccaccgtttttggccaaactaagaataaggtaaaggtttgttgccggggaaattttttacacctggaaggccaaaactgagcattttaagagaattaattcaaggactggggtcccttataactttatgcttttttttgacgatgataataataccatccaaggggc

SEQ ID NO: 53730 - DNA, 331 bp, Glycine max
  Clone ID: LIB3167-079-P1-K1-D5
attttcacatggcctttggggtaactttgcggttaagggagcgtccattaaggtaattaggggggccaccgcttcttttcccgccagggggatccttgaaatttaatggtgggttgcctttaaatgaatgaggtttgacatgaagggggaacacgtttttaacaggggtaatgggatatgtttgaggggggaatttggaaataatattttagggccaggaagttattagttaaaattattagaggtggttttttgatggggtattaataataaaggctagctttttgtaccattatggaataggatgggggcatattaataaagttagttg

SEQ ID NO: 53731 - DNA, 400 bp, Glycine max
  Clone ID: LIB3167-079-P1-K1-D6
caaaaccaaggaagctaattagcagcattaaccccaaaaacctaaaactaagtcccaaacgcgtgtttgggaaaaagggaccgatctttagtttaacgctccgaccaaccttaattgggatccggattttcttccgccgcctccaccacaaataacaggctttccgttggtaaccaaactccgaccggggtcctcccgggcgtttccggggacgggtccgacgtcgccgccgtcaacgtgcggggggacctcgcccaggctttccgcttaatgaaccgggacaacaacggcgttttaacgcgccaggacctgggggcctttttaacgtgcttgggggcgtttcctggccttaccgacttgggggtttgctctgtgatggtttcttggccggttttctttt

SEQ ID NO: 53732 - DNA, 343 bp, Glycine max
  Clone ID: LIB3167-079-P1-K1-D7
actgggctggaattcccggccgaccacacccttccggtgaagccttctttcttaaaaccctttttttttttccatgggggttccaaccttggagggggtcaataaaaaagatgttttcccgccggtttttgccttttctccttgggaaggggtttttcttgaaattaagtgtgggatcaaaaaaacaaggtttcttaagagggcttttaatgaaaaattgttttccaaggtcttaaaattggaaggataggcctttgtttttaaggttcttatgcccaaaggtccacaccatggccgggggaggttgaaaaccctaccttttttttatggtttttattttagg

SEQ ID NO: 53733 - DNA, 414 bp, Glycine max
  Clone ID: LIB3167-079-P1-K1-D8
cggccccggggcttataacttagttaatcgggaggagaatataaagtggttggtttctttggtggttgaagaagtttgggtggcatggccatcccatggcccaggttacaaaaggttccttttccaaatgaaaactggttttggggagcgtttttgggaggtaaaaggcccaggttttaggttggttggggaagcacacaacatccaacctttaaaaaccattcttgaaaagggcgtggaaccaacaaaggactacattaagggcaaccaattaaaatcaaactttaaaccagttaaccaacaggctttttttattgctagtgaacgcaaagtccataacaccaccttattaatattcggattaaataacaccgacctttttaatatccaatactatgaaaaacatggttttgg

SEQ ID NO: 53734 - DNA, 437 bp, Glycine max
  Clone ID: LIB3167-079-P1-K1-D9
ccgggccgaccacacccttccgaagggccaggggatgttggttaattgtttagaaggagggctgtaaattggtattttcgccggatggaaaatctattgtggaacctctttattgggcgctccaaggataaataacccttccgtgcaaaagaacttcacagtttggtaagcgtttttcgggggtaaaatccccaggttttaggctggttgggaaaccccacaccatccgaccttttaaaaccattcttgaaaagtgcgttgacccaccaaaggattcctttaatggcaaccattttaaatcaaactttaaaccagttaaccaccaggcttttttttttgctattgacccctaaattccatcacaccaccttattattatccgcgttaaataccaccgtcctttttaatttcccatcctatgaaaaccatggttttgg

SEQ ID NO: 53735 - DNA, 351 bp, Glycine max
  Clone ID: LIB3167-079-P1-K1-E1
aaggcaaacacaatttggttacctttttttttttttttcggggaagttgtaagtgcaaatttttggcccggttaataatgggggatagtcagttttcgttttttttaacaacattaagcctttttggaaggctggttcaaatggaccttgctttgacggttgtcggttttggccaaacgtttttgggaattaaagctgcaaagggagtggtcattgttcccgaaaagaaatggccatttttatgggtggatgaagcatcagtccagaaaattcagtttttaccaccaattttaggtgtcgattttaggggcatgggtcctgattttcaggtttgggttcggaaaagcagga

SEQ ID NO: 53736 - DNA, 446 bp, Glycine max
  unsure at all n locations
  Clone ID: LIB3167-079-P1-K1-E11
acgggncgggaatnccggggcggaccacacccttccgaactaatgttacaggaacaatattttttttgaaggaggatggaactttgccaccatgggcggtggagttaagtaagcaacatcctaaggttgaaaattatggtcctgttagcaaaatttacttgcttgccagcaaaggagtgaaagctatttttgggttactggcaaaggttattgtggtggggaatgatcatgctcccataaaataattagccattggttaagcactaatccaatggtggagccatttgtaatagcaccaaacaggcaattgaggggggttaaccttattaacaaactttggtttcctaactaccgggacaccatgaattttaattaatttgcccggaaagccctggtaaatgcaaatggtttattagagaaacaatttttggggggtaggtactttt

SEQ ID NO: 53737 - DNA, 302 bp, Glycine max
  Clone ID: LIB3167-079-P1-K1-E12
gggcacccggggctttaaaccaattgggttttggtagggatgagaggtcttggaaggattggaggttaagggaagggaaaatgggaaggtgggttttgtggccaatttggggttacttggttaaggctttggtaacaggtgtgggccattcccaaaccttcttagatcattgggttgaccccggccccaacacctttttgcccagtttaaagttcaattaaaggtttaatataatattctttaccttttgggcctgggttctggttcgtttggaagttccaaaagttaaaccactttttttt

SEQ ID NO: 53738 - DNA, 417 bp, Glycine max
  Clone ID: LIB3167-079-P1-K1-E2
acccttccaacaaattgggcccgcctggccttttcattgcttgaccaccaaattcaacaggtaacttttgcgcggttggaaggaagttgtaaatcgcttttttaaaggccaggcgtttttaacccaaagccacacagctttaaaaaccaaaaggaattccatccactctttccttaacactaaaattaactccttcttagaccaaatggcagccttaaccacaaaccccagttaactttccctttcttttaagccatttctttttccgattaaccgtcttaacatgaaactggccccacttcgtttaaatggtaacgacccgtttggatggatttttaaaatatcccaattttttgactaccaaacaattttggagcaagagccttttaattgtggcgtttttttacatggatgggt

SEQ ID NO: 53739 - DNA, 403 bp, Glycine max
  Clone ID: LIB3167-079-P1-K1-E3
ggcggaccacaggcgtccgccacacgcttccgccaacgcttccgcccacccttccgaaaatggagccttaaagatttttggggggccgcggaaagtttaattttaacctttcggttttggaggtcagcgttggacaatgttgttggggggaaattgaagttgaagggaaaagcactggttgtggttggtggagtgaagaataggaaaaggaggaccaggggaattcgggaccaacttttgcaggtcgccaagaataaagtttaagcagggggaaatccagaacaggccaaagatcctaatgatggagatttaaattgttgtgggggaattaagcgggaaggggaaaacagcccattttgatgatcattttacaccgccgggagggcgttccataaagcaaagg

SEQ ID NO: 53740 - DNA, 320 bp, Glycine max
  Clone ID: LIB3167-079-P1-K1-E4
cccacctttccgcccacgcttccgaaaggttttactttaataggcacattttggggccaagcggggggtaaaaaaattttttaggcttccttaattttaaaaggttccaaatttaaaggaagggcttttttctctaattagtcctatggcctgtcaaattgttttgggaagacgttttaccctggacaaggtctacaaccaaagtgggcagtaccaccaaaggggtttttccaaagggtggggtcggttttagagctgaactcaatttaccacttgtcataagcctaagaactgggtttttcctttttttgggggggttt

SEQ ID NO: 53741 - DNA, 402 bp, Glycine max
  Clone ID: LIB3167-079-P1-K1-E5
accaaccatccttttggtttggaaggtggttttggccttatggataaaagttctgccaaatcaagaggggttttcagaccatagggggggggggggggtaaaccaagggctaagttcttggctgttttgatctgggccctcatggccatttccatccttaaaccaggggttttggttgttattgagcaagggggccacttgtttgccaccaggaccaattttggaagggggggtgtcaagagatcccaatgcccataccaaggctcggggggatgtagccggccccaatcccacaggccctcgttgtttttttgtcaaaagggctgcaggaaatgcctgtttgtccccccggggttttttggtattaaagctgggggcccttgttccaccacctggaagccc

SEQ ID NO: 53742 - DNA, 446 bp, Glycine max
  Clone ID: LIB3167-079-P1-K1-E6
tgaaattccggggccgaccacacccgtccgattcttggaaaaaaggtaaaatggggagggtggccaaggagaaatatttaaataccgtaaataatttttttgtggggcccccaccttattccaaaggattagattccattaatgaggaccgggggggggtcctggatatgcgtttatttgaaacgggagaatttgcactaattgcgggggtgggggtcccaactgttccagaatggtttcttacggccatgctaataaagtaagaaaaactaatttttgagaggttttgacctacagttggggcccagaactttgctaaatagataaaggatccttcgtttttttgatgatgtaagaagagttaattaaagaagcacggttggaaacataatttgggactttactttgtttttagggcagggtacttaaaagcttttggggatggg

SEQ ID NO: 53743 - DNA, 373 bp, Glycine max
  Clone ID: LIB3167-079-P1-K1-E7
cccacccgtccgggaataaacatataatattggggttccctcgattgacatgggcgagggtttgggccatttggcaatggcacctaaggacattattaaatgggtggaccccataagggccaaggggggaaccataacaggggaccctggtccagttaaggggggaactacggtaatcgccttggttaaggatcctgagggttttcctttgggactaatccaaagacctccagtccatgacccatttggtaaagtaaggcttcgggtgggggattaaaagcgctcaattaagtttaatgaaaaggctttggccttaaaggtggtaaggaaggttgataaccctgagtccaagtccactttagctttgctcggg

SEQ ID NO: 53744 - DNA, 445 bp, Glycine max
  unsure at all n locations
  Clone ID: LIB3167-079-P1-K1-E8
acgggnccggaatcccggggccgaccacacccgtccgttggtccaaaaggcatgggttaaatttagtcaggaataataatttttttaagggcagggattggtattaggctaaaacctaaccaggctttacttggaagggggccttggggggccattagtaaaggttattttcaaaggaaactggtcaaaggtccatatttttggattatgttattaaaaccataatgggccctttttggccagtttttcttttactggtttaaagtccaatggggtggttaatatcctggtggccattggttcaaggtttaaggaccctccttggttttgttaaaaggaggtaccataatggttggtttggttgcaattatgggatggttgaggcaccatttcttggctttaattcttggccagaattgttgtgggggtttggattttaggcaaa

SEQ ID NO: 53745 - DNA, 456 bp, Glycine max
  unsure at all n locations
  Clone ID: LIB3167-079-P1-K1-E9
acggncggaaatacccggccgaccaacccttccaatttaatttgttcaatttcttccggtttcaacttataaggttttttaaaagcaagcgaaggactttaaccttttataactcccctccctccattttcaaccgggttgaaaaagttaatttcttaaagttttttctttaaattatttatgtaaaaagtccatatttttgaattttgttattaaaatcatattttgccttttttagtaaatttttcttttatttgttaaaacttcatattgatggtttatttttttatttcaatttttttaatgtttaagaacccttttattttattttaataggaggtatcagttttttattttttcctttattttttttatgtctgttccaaaatccttctttattatttttggttttgaattgtatttcgaatttcttttttctcatttattttttaattt

SEQ ID NO: 53746 - DNA, 354 bp, Glycine max
  Clone ID: LIB3167-079-P1-K1-F10
ggaaatacccgggcggaccacacccttccggacttgaagttaaacaggaacatttggtgcatgggtatccgaagggggccaaggcgggtcggggttaaaattgcccgcacccggaccaataagaaaaaccccaagggggaactttattttttggtaacagtggttgaaatccaaccggggggtttaaaaggttgggaaactaaggttgttgaggatgaggattaacccctgtttcccatgaaataaatttgaaaatgttgttggagctaatggttatttactgccaatgactaatgtaataaaagcttcaaaactggtttcttttaaggtaatccaaatttccacatggttttt

SEQ ID NO: 53747 - DNA, 430 bp, Glycine max
  Clone ID: LIB3167-079-P1-K1-F11
ggagctttgcaggatttggagtcgccgttttgaaaggatgagtaagcttaaaagggaggctttgcttaaagccatttaaggaataatggccgtttccaaggagaagaatcgcaaattgggggagcccatcaacctccaaatgggttggaagaactccaatccacaaaaggccaggcgtttaaggggttccgtaaggtggcccaacatccttggcccaaggatgaaaattggcttgctgggggatgctaaccttgttgaaaaggcaaagaaaataggactggcctggttggttgtaaaaccctggaaaaagttaaccaaaattaaaaggtgggggaagaacttagttaaaaaataccatcctttttaagcatttgaggcagtcattaagcaaattcctggtttttggggtccgggtttaaccaaagcagga

SEQ ID NO: 53748 - DNA, 453 bp, Glycine max
  unsure at all n locations
  Clone ID: LIB3167-079-P1-K1-F12
aacgggnccggaatcccggggtggaccacacccgtccggccgtttttaattaaggatgggggtaagggggaagggcagggatgtttgcagttggggcttcttaacaaaccggtccaattggttgggttatttgggttgggactttattgggttttttggttgggggggcacttttggtttacaaaaaaggggtttgggcccattaaactttgcaaatggaggtttaaggttaaaacttagtcaatgtaactatttaaaaatgaaaaatatttaatgaagtccttgggggttccgggttctttcggtttaataaagggggggttgtgaaaaatttggggtggttaaaaaaaaaaaaaaaaaaaaaaaaaaaaataaaaaaaataaaaaataaaaaaaaaatatttaatataaaaagggggggcggttttaggggttcaaggtttccttccgcgg

SEQ ID NO: 53749 - DNA, 447 bp, Glycine max
  unsure at all n locations
  Clone ID: LIB3167-079-P1-K1-F2
cggaaatcccggggcggcccacacccttccgttatttttccttaaaaggatgggttcctaatggccttccaatccgtttaagttttatcaatgttatatgaataaagggatggttttttccaccaaaaccaaaaaatggaaatttttaattttttggtttggtaatagatggccggattcggttggctttaagaaaaaaggaaaaaattgaaggaaggggaaaggcccaccctagatcttattaaaggactcccaagttttcagtcggaaggggaggttaaaaacctaggttgaaaaaaaaaaggattcgccctttcgggttttcaaattttatggaaaaattattggaggtggggccttagattcgaattagatttggggtttatatcgtgggttttggaatggngattggttggttattggattcttttttatttcaggcaatta

SEQ ID NO: 53750 - DNA, 122 bp, Glycine max
  unsure at all n locations
  Clone ID: LIB3167-079-P1-K1-F3
taatttaacataaaaaaattgcttcctaattttctttcaacccccanaaacccaacaacccgccgcttatatatttaattctaaatcccaacaaaaccaaaaaaataaaaattttcattctt

SEQ ID NO: 53751 - DNA, 425 bp, Glycine max
  Clone ID: LIB3167-079-P1-K1-F5
gttgattccatccctttttaataaaacagggggattgaagggttaaccaggttttccatcagggaggggtcaaatgaggttaaacctgtgaaaaccaccttcagggagggtgaagggcctggctttaagggagaggaaaggcgtggcgggacttaattggagtccatggtggatttcgccattaccaacctgggaggcaacaatgttgatgctgtttccccagaagggccaaaaaaggatattgggttccaccagtttccatgggccccaggggttaaaaggttggttgaggccaaggttagggttgggggtaacagggggaattcccttaatgcagggtttaatggccccaaatcagaacccccaaaggcctatcttgtccaatggaagggtgctgttggaagcagggtcaaagcagttgcagg

SEQ ID NO: 53752 - DNA, 225 bp, Glycine max
  Clone ID: LIB3167-079-P1-K1-F6
gttgatacttttggcagttggtcctttgactaagggtagtaggaaggttttaacaaatcaaccgggaaaggaaccctttccccggcggtttagatcctttaaaatttaataattggaatttccaggggttttttaataaactttaaatggaatttaacccgttgggtttaaaaaaaaaaaaagattgaaaaaaagggaataaaaataagggggggccgttttaag

SEQ ID NO: 53753 - DNA, 456 bp, Glycine max
  unsure at all n locations
  Clone ID: LIB3167-079-P1-K1-F7
gggncgggaatcccggggcggaccaagccgtccgaattttttgagcccaaatttttggagcggaatatttttaaggccaggccgggtaggcgggcgcaccacaaccccgaatgggtttttgtttttgttccaatggttttttggttgggttttgttttaaacaccaccaggctttaatccaaagcttttttaaggccattacccttacggaaccaaaagaggacctttttaacaacaaaggcagggtaaaactccagggttaaaataaatgcttttttgaaggaaaaggcagttgcaggattaacagaagtttttgggacagattttatgggggttccggagggggttaatgctgttggatttaagttttccctttccttaaagaactttttgttaagaatttttgttggtgggttggttttagtagccattttggaagccgttattggggtttcc

SEQ ID NO: 53754 - DNA, 420 bp, Glycine max
  Clone ID: LIB3167-079-P1-K1-F8
acgggcgggaataccgggccgaccacacgcgtccggccattttaaggtcccaatttcgcaaatccttataaataattcaataaataaataagggggggttttttttcctttcccaactttaaatttaatggttttaaaacctggaatggggcgggggccggtatttggttacccaaggtaccacgaagtagttaagcttaaattttggcacttttagcgtttaaaaataaaaccaaattttaaaaattcaacctttttaattggggttttttttagaaattaagccgggttggccaaggaatgtgaggatgctggtttggtagcaggaaactggggtgggggtttgcaattgttgggttaggattttttgggaagatttgagtaggtttcctttgttttaagggggaccagaagtgagtc

SEQ ID NO: 53755 - DNA, 209 bp, Glycine max
  Clone ID: LIB3167-079-P1-K1-F9
cccggtccgacccacccttccgccaaagttgcagcagatccccaaggaaaaatttaaccagtttaaaggaccaaaacctggcgctggggaccattgatttgcccaatgtttccattgtgagtgaacttaggatgttaaaattgtgaaacctttgtctttaaccgaaaaatttttaaaaggatccttttttgaaaaattgttaccattgc

SEQ ID NO: 53756 - DNA, 281 bp, Glycine max
  Clone ID: LIB3167-079-P1-K1-G1
ggtaaccccttttttaaattattttccggttttttccggcctcgaattcgggcattttccacggccttaaggggcgccccaacaccaactgtttttttttttgccttggcccaaagcttggcgaatttcgccgctgattccgcaacttaccttaagcagcgggatgccgcggggatcgacaggccactaatgggtccacttggtttaagggttgaccagttaatggggttggctggttggggggtcgccacttccatttttggggtttccaaaccgggggg

SEQ ID NO: 53757 - DNA, 380 bp, Glycine max
  unsure at all n locations
  Clone ID: LIB3167-079-P1-K1-G10
acgggncgggaatacccgggccgaccacacccttccgatttaatactataccaacatttggataatattttttttagtggataacccatggttcctgggggaaagttggaggttgacgttaatttaaagtttaacccaaccaagtcctgccaaaccttaaggaactcaattgaaatattcccaaaggccttcccaaatgattccaaaaccattgaggtttttgagggggatggaaaataacctggttttatccgccacataagtaatggggaaggttaaccacttgggaagtaatcttttgagaaaatggaggttgttgataaaaaaaaaaaggaagggccgtccactataattaatggaaaactcttccagaattacaa

SEQ ID NO: 53758 - DNA, 460 bp, Glycine max
  Clone ID: LIB3167-079-P1-K1-G11
gggaattccggggcggaccacaggcgtccgaacaacaaaaccttattaagaatttccccaaaataaccgcaaaacaaggggttcttcggggagggggtgggacccgaaaccttaatcggagcttccgccgttcttccggtggacaaaatcggattactttaaaggaagtttgggggggaacgcaaccgcttccgacagggacaacttttacagccgcttgaaatccttcaagcgccagttggggttaatggacatccaggaggagtccgggagggttgagcagaaaaatttaaggcccgggctgttccaaccgcaggaggaggtgaagcggttccagtcggggccgttcgtaattggccagttaatggaaatggttgaccagaacaccggattggtgggatccaccactggattcaatttctactttagggtctttattaccattaaccggagggttttt

SEQ ID NO: 53759 - DNA, 428 bp, Glycine max
  Clone ID: LIB3167-079-P1-K1-G12
aaaccggggcggaccaacccgtccgaaaaaataataagggaggtccacaattggtggaggttaaaattttctttaaggaagggagcgttggtcttgtgtttctttaccataataactgaaattttttggtttaaggcttttttaacttttgttaacacccgaaccaaattttcaaacgttaattaaaactaagttaaattaaattcctttaaggaatttgaagagattcgattggccttgttaccgggggaactgttaaaaggggggggggagtttgaccaggaagtttccactgacccagaaactgcccaaaaaaaagacacaaagttgactgttgcatttaatctgtttaaaaggttaagggttttccgttcttggaatgagcctgccagtttgaaggttttgaaggattggctaaggaggaagtt

SEQ ID NO: 53760 - DNA, 326 bp, Glycine max
  Clone ID: LIB3167-079-P1-K1-G2
ccttccgggacccctgggccgaccccttggccgaccccttggttgccccttggcttggtcaattggccggactttgggccaaatgggattcaggggaaggcctgaaaagtcctttggaattccaaactaagggatggctttggcttcctcttttttcctcaatcccctttggggcctggcaatcaataaggattaactttatgctacctttttccttctaactaggagaaatcggggtaaaatcgcctcaataaggtggaatataataatggtggaactggctcctaaaaaaaaaaaaaaaaaaaaggccggccgttttaaaggat

SEQ ID NO: 53761 - DNA, 374 bp, Glycine max
  Clone ID: LIB3167-079-P1-K1-G3
cggggccgaccacaggcgtccgccacacccgtccgtttacaagggcctaagccgattccccaaccattttttttttcttcaattcggccaccctttcttcttcttcacacggccacttccgcttccccttccccttggggcgggcagttaacttcttccttccgggcccgcccgttgggccgcctgggtttggccgggggggacccgttgttcccggcaagtgtaccgccccccgtgccgccggtaaaagaagaaggaaaggccccaagggggggtggtttcaatgccaaaaaaaaccgtgggggacctggaccgcggcggacctgaaggggaagaaggttttggtaagggccgacctaaacgtccggttggac

SEQ ID NO: 53762 - DNA, 381 bp, Glycine max
  Clone ID: LIB3167-079-P1-K1-G4
caaaaatgtggaaaagaacgggtttggaagaaaaagcagttaaatggatcaactaaaattgaggggccctaagtttagctgttaataaactcgcccataatgccataaaactggggggcatgggtttgggagccttttttttcggatggttggttgccatggctgttattaatctgtggatttgggatcgtccaaacgggaaaacaaattttttaacagcactactaattccatacatttttttaagctggccttaattaattttggacgttttcaggggagagctgggaaaatggatggctgcagttgctgttgaattacgccttttctttccaagacacttccttgatgggttggaatggcctggggctctgattcttt

SEQ ID NO: 53763 - DNA, 415 bp, Glycine max
  Clone ID: LIB3167-079-P1-K1-G6
cccacgcgtccgttaaaccacccaaattaagtgtggtttgagagaactaaaaacccgaatggattcggggaagaacactcagaaaataaccggggctttgaagcttggggctgcagccaaagggggaagagctcaagaggctgttgtcaacggaagacccttttaaaagaccttggttgaagtcttttacaacataaacgggcagttcttaactggggacgtaaacatccttttaacaaaggttaggcctgtcaagaaagttgtatttgttggggtcacggggaaccgggttttttgggaggggttaaaaacggattcttaaaaaaagtttaggtttaattaatggaatttgtatggtctttggtttgggaatttatcttgctaagggtttcgtcaagatgggtaattttttttt

SEQ ID NO: 53764 - DNA, 222 bp, Glycine max
  Clone ID: LIB3167-079-P1-K1-G7
tttttttttagcaaaaaaggtttggcccaattaacctaacagggtcttaatggaaaggggtggaaccaggccctatggaagcttaacaaaaataattttgcaaagggaaaaggttttgttttgtttgagggttttggcaaattaaagtgggaatttgggatctcggattcatcgttttggtagtttggccattattaattaaatttggtttggcaactcctt

SEQ ID NO: 53765 - DNA, 423 bp, Glycine max
  Clone ID: LIB3167-079-P1-K1-G8
ggaaattcccgggccgaccacacccttccggttaattaaaaccagggggataaaaattaaggtcctggtttttttcgtggttccaatggggggggcttggaattgccttccttccaatttgttccttttccaaatgaacactggttttggtccccgtcctccggaggtgaattgcccaagttgaaggtttgttgggaaacaacacaccatttttggttttgaaaccattcttgaaaagtgctttgaaccaccaaaggattccatccttggggaccattttatttcagactccaaaccagttaaccaacaagtttattttattgccaaagacctggaagtccttcccaaggccacatttttgttacagttaattggaaccgtcctttttaatattccttcctccaaaaacacatgttttgggtg

SEQ ID NO: 53766 - DNA, 420 bp, Glycine max
  Clone ID: LIB3167-079-P1-K1-G9
ccaacccgtccggatgcctgaaaggaataatatactttcaaaagggattccagggtcggggggaagcaaataattggaactagtttatagcggattgtacttgggttaagtaactggttgggaattttaacttatgttaatcaaaaaattgggggggccatgggggtttaactaattgggatccttgggaagtttttgggttggtttaatggtggagtaaagcttacagttaaccagacgaagacccggatttgggggccgaaaagaaaaagttattactggaaggcaccgtttaaaaggaaccggtttaagtaattcttgggaaattaatttaataaaaggcacctgttggggcttaaataatctttaacttttgccacaatggggggacattaatttaataaaccggattgcttactt

SEQ ID NO: 53767 - DNA, 413 bp, Glycine max
  Clone ID: LIB3167-079-P1-K1-H1
agggcagaaccattgttggcagcaccaccaggttttggtcctttaaaagcaactcttttcttgggccaaggaaggggtgccaatgccaatgtttttagggttgtggtttccatgggacctgggaagtccaccatggccattgtttgggggtttggcccaaccagagggaaatacttgggacctttttaagttaaaaccctttaatacttgaagggagaattccttggggattttggttgggccactgttggttaatttgttgccccaaaaccatttgccaagaccagggtttttgaggtgatccatgggcaatgggccatgcttggagcattaggttgcttaaccccaaaggtgctaaaaaagtggttgaaagtggacttaagggagccagggtggttaaaagttggagccca

SEQ ID NO: 53768 - DNA, 277 bp, Glycine max
  Clone ID: LIB3167-079-P1-K1-H10
gaaaaggcttgttcctttataaatccaatacctggaaatttagaagggtttggaggttggagaatttagggtttaactaatcgatcccgggttttccaaggcccttgaaggaccggttctggcttcggccttttaaagtgaagcaaatttcgttaccggattatgaaacctaactcatcgaaccccttttggcattcaagggccccggccgttttttttcctcgcagtagttaattgttctgaggcgtgctgttaaagtcctgaaacgtttgggggg

SEQ ID NO: 53769 - DNA, 339 bp, Glycine max
  Clone ID: LIB3167-079-P1-K1-H11
gaattgcagggccggccacagaccaacgcttacgtttattttaccgctaactatttcattttatttaaagggttgaaaactggttacgggggccggtccttttgataacaacccctttcattatggccaatgccacgcctttttttagccctttggtggattctatcattcctggactccagtttcccatgaaactgatccgataaaattgtaaccacaactgccaaacaaatgatcgggtcgggaaaccaatttaaatttactcagccaaatttctagggtatcttaccgttgaacttttgaagcttgttgttaatgcaacctaggtccttaagatga

SEQ ID NO: 53770 - DNA, 369 bp, Glycine max
  unsure at all n locations
  Clone ID: LIB3167-079-P1-K1-H12
attccggggccgacccacccttccaattggataaagtattaccacaattttgaattgcccatggggcctttaaaatggttgaacctggtggggtttacttcngaaatgattaccttaaccctatttaattaccatttttcgccccaaataagttaacaaaggggtctttgtccattcgccccatagttgagttcattgcaccactcctttttttttacataaccgggttgaccattattggttacaaaaaacagagggccaccaaaatccccggtaacaccgaatgtgacggcgttggcattttgggcattgtttgggccttcgggggcatgatcttaatccttgtttactggactgccggaatttttg

SEQ ID NO: 53771 - DNA, 235 bp, Glycine max
  Clone ID: LIB3167-079-P1-K1-H2
acagccgtccgccaacgcttccgaaaaaaaaaaaaaaaaaaattatttaaaaaaaaaaaaaaaaaaaaaaaaaggggaaaaaaaaaaaaaaaaaaaaaaaaaaaaaaaaaaaaaaaaaaaaaaaaagggggggccctttaagggaaccaaagttacttaccccttcttggcaactaaaaattttttttttggggcccccaaaataaaataacgggcccgggttttaaaaccgggg

SEQ ID NO: 53772 - DNA, 381 bp, Glycine max
  Clone ID: LIB3167-079-P1-K1-H5
gcagggccgggcacagccgtacgccaaggcttttgccaaggcttccgtataattggtcctttaataaaaccaaaatcccgtggatgtttggtaaaagggttggaacgaaccaaacggcccgaaggtaaaccggcggaaaggccccgcggaagcagttggcaactaaggcggttggaaggtcggttccggcgaccgggggggtgaaaaagccgcccagattcaggccgggaaccggggcgctgtccaggatccggaagtcccaaaagagcccggggctcctaatccggaagcttccgttccagcgctggttccaggggatcgcgcaggacttaaggaccgacctccggttcaagagctcctccgttttccgcttcaaggagg

SEQ ID NO: 53773 - DNA, 258 bp, Glycine max
  Clone ID: LIB3167-079-P1-K1-H6
aattccgggaccgaccacacccgtccaattggataaagtattaccaaattttgaattgcccatggggcctttaaaatggatgaacctggtggggtttgttttgcaaatgcttactgccatccaattaattcaaaattttcctgaccgaacatataaataaatgcttatttcccttctccaagaaaataaaaaagctggtgaaccaactaacaaagggtttaattggtataaagttaaacggaaggctagtcctgatcc

SEQ ID NO: 53774 - DNA, 372 bp, Glycine max
  Clone ID: LIB3167-079-P1-K1-H7
gctggaattcccggtccgaccacacccttccgaaaggtagttttatataccaggggaagaaagtgggtacccttccggcaaaggaaattgggaggagaatttttttccctttcctccttaataacattaacatttaagggctttttttttttcccagcctttgcccctcaccatttgaggaggaaatgggtggccattgtttcgttttcggatttcctggaatttccggtcaagccggttcaaaaggttggcaagatttttcgaaagggcttttaccagaccaaaaatgtggaccccaaaggccaggttgttttggtcccagaaacctgttaaagcttgtgaggacctaatatttaatcatttgaaccagtt

SEQ ID NO: 53775 - DNA, 400 bp, Glycine max
  Clone ID: LIB3167-079-P1-K1-H8
aaaccatttaggttttttaaaaccaaaggtccttaaaacaattttcccaacacttttaggggggtaattttttttttggttttttcccaacaaaggggtttgggcccttttttttgggtggggcatgggccagggttaaggtttttggggttctgttttggccactcttgggcttttcaatgataacaactaaggttatggcaccagattttgttaataattggattggaaggaatattggccctgggagtttaaggagttaacagggcctttttgaatgcacaggaggatgtagccggccacagtcccacaggccttgattggttttttgaaaccaaggttgaaaaaggggccttggggttcctccgggttactatggaaccaggtttgtgggcccttg

SEQ ID NO: 53776 - DNA, 433 bp, Glycine max
  Clone ID: LIB3167-079-P1-K2-A1
gattttatccaattgaaattttaaaaatgactgggataaacttaagaattcaattattgaaattgaataagtaaacaatttaattggattggtcgaatggtatcaaaaaaatggagtactaactcccatttcttatttattattgaattaaccgatcaacttgctttgttatcgaacatttctttttgatttcaaaaattttccggaaaaaatttgaatctatttttatatgcgaatcaatcctactacttctggtcctgaggtttctgcgcttgaaaaaaaaaatctgggacgtatcgcccaaataattggtccggtactagatgtagcttttcccccaggtaagatgcctaatatttacaacgctctgatagttaagggtcgagatactgttggtcaacatattaatgtgacttgggaagtacagcaattt

SEQ ID NO: 53777 - DNA, 401 bp, Glycine max
  Clone ID: LIB3167-079-P1-K2-A10
tcccactcgtccgacctggctttagttttttcttctctcccaccaacatacgttattagaggggtttctcaccatgccagcgtgtgtccatcatcttgatcgttaatttcaagccaagacatgcttggtacactgattacaagctcatgattttcaacaaccatgcagctattattgttattgccttactagtacatgtgaatgaagctattataagttacaaagctttctccctaaagaatgaattgaagaaattgatacaccttgtttttcatgccatcgcattaatacttgtaataggcggagtgtatactgcctttaatgtttacaatgaaagacagattgccattttgtacagcttgcattcattgctttggattggcgttatttgtctttatggc

SEQ ID NO: 53778 - DNA, 378 bp, Glycine max
  Clone ID: LIB3167-079-P1-K2-A11
cccactcgtccgcccacgcgtccgcggtacctcttctgcggcgtagcaatgggacacggcagcgtttggaactctcacggaaggaactactgtcctggttctcgcacttgccgtgtgtgtgggaatccacatggactgatcaggaagtatggccttatgtgctgcaggcagtgcttccgtagcaatgccaaggaaattggcttcatcaagtatcgctaaaagagcagttgtcaactacggaccaatattgtgttctggcactaggatgttttgaggatgttatgtttgaagaaacttgagactggcttttttcatctaattaattatcagacgtaatttgtggtactaagaatacttttatataaattgttttgaacc

SEQ ID NO: 53779 - DNA, 437 bp, Glycine max
  unsure at all n locations
  Clone ID: LIB3167-079-P1-K2-A12
cccactcgtccgtatccaacaagcttacttttataccagagtcctcgaagtacataggaagggcacatttttgcacagaggangaaacaccatcctctctaatattccatactacaaaaaacatggatatggggtgctgatatgacactcctccttatattatggactaatctacatggacactgcaccaactctgccctagaactttaagaattacagcatgcttgcaccccttgacttcaaaatgatttatttatctggtattacactgtacatacagtccataacagaatctaactgtgagcaggctgcctaccacacatggtaacattaagattaaaggatccacatgataccttcacctcaaatgcatagtgatacataacatcactcggagagatactaattaggcatggatacaacatggttgagatcat

SEQ ID NO: 53780 - DNA, 367 bp, Glycine max
  Clone ID: LIB3167-079-P1-K2-A2
gcttatttactactgaaagatggattccaagaggatgatagcattacttatattcggtctgctggggatgctccttttcatctcatgagaggtgacagccagagaactgaaagaggccactggtgctgacttgactggtggccgtgtcgtaaactttgttggtttaagcggtattgctggtggtctcaccattgcgattcggtttgaatacaaaatgaaaactcacattgcatggattaagcagcttacggggaccgcacgagtcacatggattcttcggagagcctggattccccatcacttgcttacgaagaacacggattccaaatcctctctcttcaatatggacgcggccatcaggagcgac

SEQ ID NO: 53781 - DNA, 454 bp, Glycine max
  Clone ID: LIB3167-079-P1-K2-A3
cccacgcgtccggttgaagaagaagcatgacgaagaaggggaagaagcaattgatgtcatcggcgccgtggagaggcgaggagagtgaagaatccttcaaagagggaaagctgaaagtgacgaggcagggtgatggcacttccaccatgcacgtccctgcctccaagtccaagcatcatcaccatgacctccacgacgacctcggaatcgagattgatcctgaactacgctacagcttccagcgcaattttcagtttcttcagcgtgtttttagcattgacactatggtgaaacctcttcctcctgtcatggcatacaatgtctctcgcaacttgaacttcttcactcgcattttcacacaattctttgatcctgaaggtattgcaaatgcccagaaatccttgggcataggacaggaagataaagttcgcaaagttcgttggagacaaatggg

SEQ ID NO: 53782 - DNA, 410 bp, Glycine max
  unsure at all n locations
  Clone ID: LIB3167-079-P1-K2-A4
ctttttgattcctaaattctctaaaattcgaaattctaatttcgttaggggaaagagattgggtgtgtgtgagtgagtatgggtggaaaaggcnagggtcctgctatcggaatcgatttgggaacgacgtactcttgcgtcggcgtgtggcaacacgatcgtgttgaaatcatagccaacgatcagggtaacagaactaccccatcctacgtggctttcaccgacacagaacggttgatcggcgatgcggcgaagaaccaggtcgctatgaacccaaccaacaccgtttttgatgctaagcgtttgattggaaggcgtttttccgatgcatcagtacaaggtgacatgaaattgtggccgttcaaggtgatttctggccctgctgagaaacctatgattgtggtgaacta

SEQ ID NO: 53783 - DNA, 297 bp, Glycine max
  Clone ID: LIB3167-079-P1-K2-A6
gagaatagaagggctacacaaacacaatctctaatttcactcaggatgtgggcttcttccacggccggtgcactcaaactctcgtctgtctccagacctcatctcttgcctcctttttctttctccagatgcttatcttccgtcttggatggacttaagtacgctgattcacatgaatgggtcaagcacgaaggctcagtcgccaccattggtatcactgaccatgcccaggaccatcttggagaggttgtgtatgtggagctgccagaaccaggtggcacagtttccaagaagtct

SEQ ID NO: 53784 - DNA, 454 bp, Glycine max
  Clone ID: LIB3167-079-P1-K2-A7
gcttaggtttcacggcagatcctgacactgttttggagaaagcatgtaacgaaatgaaaaagagttctaaaaaactaaagatgggagaatttctcaagaaaatacatgcatattacatccacattgtcatcatttgttctcattcttgaaggattcatcagtttctttgccggataacctcatgcttatgcccgatgccatgccctgtctttgtcatatacacaaaattatctctactggataccatataaccaacagatcctgaaattttatctccagccatcaataatgcattgtaagaagctcatgatcagtctgaacgaagacatcaaatgtgaaatgaatccatctgattagactctagcatttgctttctctcaaattgaataagaccgatatgggtgtaggttaagcgagagtggattgtgtatcttctagcttaatcatgtagtct

SEQ ID NO: 53785 - DNA, 450 bp, Glycine max
  Clone ID: LIB3167-079-P1-K2-A8
cccacgcgtccggttgtaactcgttcttcttcttttgttctgtgtttgtgtttgttttttggctcacctgaaaatgtgtgggtgcggtggtaactgtggttgcggaagctcctgcaagtgcggcaacggctgcggaggctgcaagatgtacccagacttgagctacactgagtcaaccaccaccgagaccttggtcatgggagtggcacctgttaaggctcaatttgagggtgctgaaatgggtgtgcccgctgagaacgatggctgcaaatgtggaccaaactgctcctgcaacccctgcacttgcaagtgaggtgttgggagagcaagcttcaagcagagatagcccttaattaggaataatgattaactattaatgtgtagctaaaaacttatgtattatgtctgtgatggttttcgtgcactctggtgttttgggttaaacaaaca

SEQ ID NO: 53786 - DNA, 386 bp, Glycine max
  unsure at all n locations
  Clone ID: LIB3167-079-P1-K2-A9
cccacgcgtccgcccacgcgtccggaaggagtgagatcagaggaagggaggaggcatgggggtttgaaagagcgaaagagagagagatggcttcngngtggggaatcacaggaaacaaaggtcgctgctacgatttctggatggatttcagcgagtgcatgtctcgctgccgagagcccaaggactgtgctcttctccgcgaagactacctcgagtgcctccaccattccaaggagtttcaacgactaaaccgtatttacatggaggagcatcgcaaactaagggctgcttccatgaaaggccaggaggatggggttaatgaacatcatcattagcacctgaagttaattttaatttaagcttctgaccaattatttttgataaat

SEQ ID NO: 53787 - DNA, 65 bp, Glycine max
  Clone ID: LIB3167-079-P1-K2-B1
ttcctttcacccacctcccccacctcctccactctttctccactcttcttaaaatattcatctct

SEQ ID NO: 53788 - DNA, 407 bp, Glycine max
  Clone ID: LIB3167-079-P1-K2-B10
gctgcacaagctcttgtatcatcatcatctcttaccttctcagccgaggctacaagacgaaaggcttggaccaagatcaggccagtctccatttggcttctcaagaaaagcctcctttcttgttaaggcagctgctactccccctgtcaagcaaggatcagacagacctttgtggtttgcatcaaagcaaagtctttcctacttggatggcagccttccgggtgactatggatttgaccctctgggactttcggaccctgaaggaacaggagggttcattgagccgaaatggctagcatatggtgagataatcaatggtcgttatgcaatgttgggtgcagttggtgcaatagcacctgaaattctaggcaaggctggtctgatccctcaggagacagcactcccat

SEQ ID NO: 53789 - DNA, 413 bp, Glycine max
  Clone ID: LIB3167-079-P1-K2-B11
cccacgcgtccggtggttttgcctgcaacagtaggtgttgagagtacaatttggttgttgggcaaggctcatgtcattgtgaatgactctggttatcatcagctcataagccattggttaaatactcatgcagtgatggagccatttgccatagcaacaaacaggcatctcagtgtgcttcaccccatttataaacttctttatcctcactacaaggacacaataaatatcaatggccttgctaggcagtccctgattaacgcaggtggcattattgagcaaacatttttgcctggaaagtactccattgaaatgtcatcagttgtttacaagaattgggttttcactgaccaagcattaccagctgatcttgtcaagagaggattggcagttgaggatccctctcccccaca

SEQ ID NO: 53790 - DNA, 454 bp, Glycine max
  Clone ID: LIB3167-079-P1-K2-B3
aacaatagttctctccctagaaactcatgatatgctagataagccatccttaggagcaatatatccgtcctcttcaatttattagcagaaggtgtgttgcgtattagaccatagtctttttgtcattgttgtttcccaacaacgcagtttagcctttgagagcatcagcaatcacatggtgatcagaatatcattcagcaattgaagatcagtggcatcaggcataggctagcaagcaatgatatggctttcttcccagcaaatttcatgctacaaacacctcaccaagatgaccatcaacctccaccttcactcaactcaattataacttcatgtgcacctcaagagtaccatggtggaggagcatcctttcttggcaagagatctatgtcattttcagggattgaacttggagaagaagctaatgctgaggaagattctgatgatggatctc

SEQ ID NO: 53791 - DNA, 191 bp, Glycine max
  Clone ID: LIB3167-079-P1-K2-B4
ctttaccagttgccacactacacctagatttccactaaacccgtttgcgctgttgtttgcggggaagtttcatctaacaggagcgtgggaacattaaatgaggatgctttgaatgggaagagcgtgttcgagagggtctatctagtcgtcagtctagatgaccaccatgtctttaacgtttacactagaat

SEQ ID NO: 53792 - DNA, 456 bp, Glycine max
  Clone ID: LIB3167-079-P1-K2-B5
tccacgcgtccgcccacgcgtccggaagggttcctcactctcttcatctgattgaacaaaatgtacgacctcgaggaagaaaatgcagagggataaggatgccgagcccactgaatttgaggagacagttggacagtacttgttcgacttggagaacaccaatcaggatctgaaaagtgacttgaaagatctctacataaaccaagctattcaaatggatgtggctggtaatcgcaaggctgtagtcatctatgtgcctttcagattgaggaaggcattccgcaagattcatcttcgacttgtcagagagttggagaagaagtttagtgggaaggatgttgtcttgattgccacaaggaggatcgtgcgaccgccaaagaaaggctctgctgttcagcgaccccgaacccgcactttgaccgctgtccatgatgccatgctggaggatgttgtgta

SEQ ID NO: 53793 - DNA, 458 bp, Glycine max
  Clone ID: LIB3167-079-P1-K2-B6
ctggttctgttctgttcttctttctactcacaacaacatcagaatcagaaacaacaatgggcgacggtaacttggaagatgttgcctgtctggatctcatgactgagctccttcgtcgtctcaagtgctcttccaaacctgacaagcgtcttattctcattggcccacctggatctggaaaaggcacccagtcaccaatcataaaagatgagtactgcttatgccacttagctaccggtgatatgttaagagcagctgtagcagctaagacccctcttggtgtcaaggctaaagaagctatggataagggagaacttgtttctgatgacttggttgttggcattatagatgaagcaatgaagaaaccatcatgtcagaaaggtttcattcttgatggttttccaagaactgtggtccaagcacagaagcttgatgagatgctgcaaaaacaaggagtt

SEQ ID NO: 53794 - DNA, 219 bp, Glycine max
  Clone ID: LIB3167-079-P1-K2-B7
tccacgcgtccggaaactagcaaggctaatgagattgagtgggaacacaaaagggggggggaacgtctaaggagccgcgagaggtataaaagggatgcacaaaaagataggatcacagaaagataggaggatggggacaggagacattgataatgaaagagatcggctctgatatacagtgtttgagaggcttaggagatgaaaaaaggcaagagatag

SEQ ID NO: 53795 - DNA, 341 bp, Glycine max
  Clone ID: LIB3167-079-P1-K2-B8
gaggtgacctaaaacaaagggaatgaattgctcaatgatgttctccccagctgttccgaccgggtaccatgccagtgccgggctggctacttcattcacctgcctcaaatccatggctgtcttgcccactactaagaccaacaattacactacctgcatggttggcatcggtggacagatccaatgcatgcatgtgtcgacaccaattgagaggaagaaatccgcgactgtttactactttccagacctatatgatgcccacttggcaacagatgaccaacaccctctcttgtatggctggatcccttgcttgcaatccaaggtcacacacgggttcagtg

SEQ ID NO: 53796 - DNA, 203 bp, Glycine max
  unsure at all n locations
  Clone ID: LIB3167-079-P1-K2-B9
tcttactcccacgcttccagagaatatannattttctatacttcgttcgcaaattcattctttgatgcatgcttctttactaatttcgagcagagcttacattttntctaatctctaccattattattccattctcactatttaatatcaaaatatccaattctcttcctacatatttttttaacttattttaatcacattat

SEQ ID NO: 53797 - DNA, 404 bp, Glycine max
  Clone ID: LIB3167-079-P1-K2-C1
cccacgcgtccgaatatagcccaagccctattcatctaaaccctaacacacacccatttgatgcaggttccatggctagcctcgagggggcatttttggctgcagtgctctgcatggttgtggtgagtgcacccatggcacatgcagctatcacgtgcgggcaggtgacgagtagcctggccaattgcatcggttacctccagaagggaggaacgccgtcgtcgggatgctgcaacggagtgaagagcctcaatgccgccgtcaagaccaccgtcgaccgccagactgcgtgcaactgcctcaagtcggccgtcagccaaatctccggcttcaacgccaacaactccgtcttgctccccggcaaatgcggagtcttcatcccctacaagatcatcaccttcacc

SEQ ID NO: 53798 - DNA, 338 bp, Glycine max
  Clone ID: LIB3167-079-P1-K2-C11
cccactcgtccgctggctttaatgctcaacctttactggttatgattcccccaggaaggcaggccattttacgtgaggggggagaatttcatccttcatcttggaagtgctattcatgcgtatattactgttgccttgtctctatataatttgatgttgttgaaccgtgttatgactttatcaaaagagggtcctgtattttttattttatttttattatgagaacatgaaacatcatcgtaatttctgtttgcttccctactgttttgtatcatatatagattggaatgatttgggagaaaaaaatttgctagtgtctatgcgtaattacattcctt

SEQ ID NO: 53799 - DNA, 377 bp, Glycine max
  unsure at all n locations
  Clone ID: LIB3167-079-P1-K2-C12
acttgaataacctctgaaaatcctttctttctttcatcgatcactctctctctctaagtctgttcaaatctccgaacggttccgctccaattttcatttccctgaacaaaaccaaaccctaaccctttctttctgtatgatacctgattcccccccagaggcgtagtttttgtgtcgatttgtaaattctttcggtagtttaggttagaattttttgtgaagtttttagggttttgaatcggtgagatgaatcacatcaacaacaatagatgcgaggtaccctcccgtnatttggattgggcgcggaggtttcaatcccaacctgttccagaacccttgcctgaaccataacccttacctgaaccagatttattact

SEQ ID NO: 53800 - DNA, 455 bp, Glycine max
  unsure at all n locations
  Clone ID: LIB3167-079-P1-K2-C2
cccacgcgtccggtcatgtcaatggctgcaactcttactgctgtaagaattcccactttccaccaagtccatctcaaacaacacttcgcggcaccctcttcctcttccttacgcctcctcaatctcgcaaagatggaaggaagtgagatcagtgagcaagtagtaggggaggatttgggagcaaagaagaaagtttttgtagctggagccactgttagcactggcaaaagaatcgttgagcatttactggcaaagtggtttgctgttaaggctggggttagagacaattacatggccataacatcccgntgctctgccaacccatcttttcaaattgtgaaagctgatgtcacagagtgttctgataagctagctgaggccatcggtgactattcataagcagtagtatgttccacaagcttttgcccagtgtggtatttactcgctccctggaa

SEQ ID NO: 53801 - DNA, 424 bp, Glycine max
  unsure at all n locations
  Clone ID: LIB3167-079-P1-K2-C3
gaaagattgagctttcaggagagaggaagagagagaaaaaaattggatttttttttggggtgttccaatggttgaactggaaatgcaaagaagggtgtgagaaaaaaaaattgcatcttcttttggtgggtgtctctgaaactatgatcttgtgaaaacccagaaaggaaaccttcggtgcgcgttggtagatagatagagagagattattgttgttgggatattctgagaaccgttgattgagaaatgaacggtggtgatgaggtcgtggcagctccggcgagtccaccgcagccgctggagtggaaattctcgcaggttttcggngaacgtacggcgggggaggaagttcaggaagtggatataatttctgctattgaatttgacaagtctggtgatcatcttgctacttgtgatcgtggtg

SEQ ID NO: 53802 - DNA, 400 bp, Glycine max
  Clone ID: LIB3167-079-P1-K2-C4
acacttcgcctcactctcttttatttcgttcctctattcgctacgtcggcgttggggtcgtcttcggatcggtggaacttgactgcgccggcgtgaattccgacgctgcgagtggcaccgaattgcgatagcggtgacgaatatgaaggttttcgttaagactctcaaaggcactcacttcgaaatcgaagtgacgccgcaagacacggtttctgaagtgaagaaaaatatagaaactgttcagggtgcagatgtctatcctgctgcacagcaaatgctaattcatcaagggaaagttcttagggatgcttctaccttggaggagaataaagtagttgaaaatactttcattgtaattatgctatcaaagagtaagagcccattcgttgaatgatctact

SEQ ID NO: 53803 - DNA, 98 bp, Glycine max
  unsure at all n locations
  Clone ID: LIB3167-079-P1-K2-C6
atttggtcacaaataattaggctcattcaatattctaaattgattatgtatcttgagatgaaagtactttattcaatctggtagacgcagcttanatt

SEQ ID NO: 53804 - DNA, 232 bp, Glycine max
  unsure at all n locations
  Clone ID: LIB3167-079-P1-K2-C7
tcttcctacaaatcaaatccatttccacctccaacttttctatttttctctccttctccctaccctaaaatttttttctacataccaagggacactctacctataccttttcttttaccttcaacaatttcaacctattccaaccaaacattattctccaaaaanaatctactattttatttctttctctctttacaactcaccaatattaatctctatcatatttctctat

SEQ ID NO: 53805 - DNA, 274 bp, Glycine max
  Clone ID: LIB3167-079-P1-K2-C8
gcataattggtgcagttcccaaatccactctgtccgcaacagtggaaaaatacgttgattcggaaactgagaaaatgatgacgaattgcaagcattacagtgcaagaattgaaggagtggaatggaagaagtgacaacagtgacattgcaaatttcattctcttcaattcttttccatgccttaaatggcaatagatagtctgtttataagtttaaggaccaactttcctttctgtggtttgacacttttaagtaatacttgtacccttttttt

SEQ ID NO: 53806 - DNA, 333 bp, Glycine max
  Clone ID: LIB3167-079-P1-K2-C9
gtcgactacaactctgcgttctcagtgtttcttgcagaagcatgcgaaactgtaggaggggaagcctgcatggcggaggggtaccctgaaacgaagctacagccagaggctaagactccacgagtcgttacagagaacgttgagagagagtatcttgaatacgatgatcctaaaacggtatttcgaggagaggcttgtgatgatcttggaggaactttctgtgagaccgagtatcataagggtgtctactagagaaatgtgaaaaccctttttattgccatgactactgcgttttcaatgtgaaccagtgggaattgttgtgttttatgttca

SEQ ID NO: 53807 - DNA, 444 bp, Glycine max
  Clone ID: LIB3167-079-P1-K2-D1
cttaggcactttcttgttttctctctcaccctcatatccatcatcttccacacccatggagcgttgtctgatcaatcaataatgaaggtacccacagaccaaccaagggtagagaaactgacccacttgcattttttctaccacgacatcttagagggcaagaacatcacggtggtgaaaatcatcgagccatcagcgagcgaggttcgtgaagcaactgggtttggaaccactttcatgatggacaatgttttgaccgagggtccagagctgagctcgaagcacgttgggagggctcatgggctgtttggcttggcctctttggaggaccgtggaatggtgatgctcattaacttggctttcagtgagggtgagtatgcttgcagcactctcagcatgcttgggaagaaccctgttaggacactgttagggaaatgcccattg

SEQ ID NO: 53808 - DNA, 418 bp, Glycine max
  Clone ID: LIB3167-079-P1-K2-D10
tcccactcgttctcccactcttccggtctatctatgggggaattcaagcactttgtaagtgtgaggttcaaggaaggtgtggcgggtgactatctcacaaaagggatggaaaagttggtcacggagattggtgctgtcaagtcctttgaatggggacaagacattgaaagcctagatgtgttgagacaaggtttcactcatgcattcttgatgacattcaacaagaaagaagactttgttgcatttcagagccacccaaatcatgtctagttctcgacaaagttttcgtcagctattgagaatattgtgctactggatttcccatctactcttgtgaaggccccagcatgatcctaaagatatttaagcaataaaaattccctctttaaatttgtttagtgtatgtttgttcctgttt

SEQ ID NO: 53809 - DNA, 433 bp, Glycine max
  Clone ID: LIB3167-079-P1-K2-D11
ggatgccaggctctacatactgagtctgcagttttggcttggggggtctcctgataagtgggagaatttcctgaaaaggagtgctggatcgtatattccggcgctgaaagggacgaagatcgagtattcggagccggttttgtacttggatgtcgggatttggcaccctctggctccttgtatgtatgatgatgtgaaggagtatttgaattggtatggaaccagaagggatgcaaatgagaagctgaagagtccgagtgcgcctgtcattggtttggttttgcagaggagtcacattgtgactggtgatgatggacactatgtggctgtgatcatggagctggaggctagaggggctaaagtcatttccatttttgccggtggacttgacttttcagggccagtggagaaattctttatcgatccaattacc

SEQ ID NO: 53810 - DNA, 207 bp, Glycine max
  unsure at all n locations
  Clone ID: LIB3167-079-P1-K2-D12
tctttctctctccaatagccaaagactctttatcggagattcaaagntattttcctagcaaggtctactattacccacggccggccccattctactacccctcctaactcctaaagttatccttcttcctagccctaatctccatattctacaccaccctccttttcctttacttcaccatcctcaccatcattctctacaaccacc

SEQ ID NO: 53811 - DNA, 405 bp, Glycine max
  Clone ID: LIB3167-079-P1-K2-D2
cacacacattcctttactgaacgaaccctatttatttataagaaccatcctttcgaacacgggcgggggatctaaaaattaaagccgggtgacaaaaaaatattctttaaagtcactcgcattgcaacaagaagtctaaagaaatcacctttttattccccactacattaatttccagatatattcccttaaggctggtcagaaaattgctattatgcccgtttcaacacttaatcccaacagtactccagacactatgtattatacccagatcactttacaattactttacaacaatttttaatatgtcatgtctgggaagctctacatgataacacaaggttcaaggcctgaaaaagccgacattaattatttattttgtgggcttttgatgatgcttaacgg

SEQ ID NO: 53812 - DNA, 419 bp, Glycine max
  Clone ID: LIB3167-079-P1-K2-D3
ggccgagataaccctagagccgagtgatcttatggctcaaacaaacaaaagaatagtgccaaagttcactgaaatcttgcgccgggaggacgcgaactacccttacagcgccttcatcgcgtcggtccggaaagacgtgatcaaacactgcaccgaccataaagggatcttccagcccgtgctgccaccggagaagaaggtcccggagctatggttctacacagagctcaaaactaggaccagctccatcacgctcgccatacgcatggacaacctgtacctcgtgggcttcaggaccccgggcggggtgtggggggagttttataatattctattattcttcctcaatcatctatttatcattcttcattactttactcttcttttatttttttccttttttccttaatttattcttt

SEQ ID NO: 53813 - DNA, 446 bp, Glycine max
  unsure at all n locations
  Clone ID: LIB3167-079-P1-K2-D4
gggtgaaggccgaggcactgcaaataatgggtgtattttcactgctcccaaggctcgtcgtgttcggtctcgattacactctggggccgttctactgtgagtgccggtcgaagcacgacacgccttctctgtttccacattcaagagggatattgcatgcactcaaacaggagaggattgatgttgccattgcttccaagtcgccaactcccgacatctcaacaacgtatcttgacaaactcagcatcaggtcaatgtttgctgccgaggaaatattttacacctggaaggacaaaactgagcattgtcagagaattcattcaaagactggggtcccctataactctatgctcttctttgacgatgataataataacatcccaggggcctcagaacttggagtgacaagcatnttggttagaaatggggtaaatcttggagcattc

SEQ ID NO: 53814 - DNA, 298 bp, Glycine max
  unsure at all n locations
  Clone ID: LIB3167-079-P1-K2-D5
actctccatggccttctggttaactctgcgtttaatttagcgtccattaaggtcattagtaacgccactctccttctttcccgggaaggggatccctnaaattttattgttggctgcctctaaatgaatgaggtatgacatgaagggtgaacacgtatctcacaagtgttattttatatgtattatgatttataatcctattatcatattatatccatttattttattttctttatatcccttttttttatatttttttatatcttcattttctaatttatttatttttattactttt

SEQ ID NO: 53815 - DNA, 456 bp, Glycine max
  Clone ID: LIB3167-079-P1-K2-D8
cggacgcgtgggctataagctagtttatcgtgaggagaatatgaagttgtttgtttggttggttgctgcagtagttttggtagcatggccatgccatggcgcaggctaccaaaggttccctctccgaatgaaaactggctatggtgagcgttcttcggaggtaaaatgcgcaagttttaggcttgctgtggaagcacacaacatccgagcctttaaaaccattcctgaagagtgcgttgaaccaacaaaggactacattaatggcgaacaatttagatcagactctaaaacagttaaccaacaagctttcttttatgctagtgaacgcgaagtccatcacaacgacatatttatattcggcatagataacaccgtactctctaatatcccatactatgaaaaacatggatatggggtggaggaatttaatgaaaccttatatgatgaatgggttaa

SEQ ID NO: 53816 - DNA, 310 bp, Glycine max
  unsure at all n locations
  Clone ID: LIB3167-079-P1-K2-D9
aagtgacaagggatgtttgcttattggctagtatgatggctgctaatttgtattattcccgaatagaatatcttatgtttaggctctctatgtggcgctgcaatgatgaactacgcgttcgtgcagaagaacttcacaggttctttatggttgatttttntgctttttttctttatgttttttgttttaaattctcctttttttttttttatttctattcttttctatttcttcttcatttatattttttttatttttattttttttattatttttttatatatttgggggggggggggggggggtgttt

SEQ ID NO: 53817 - DNA, 461 bp, Glycine max
  Clone ID: LIB3167-079-P1-K2-E1
caagcaaacacaactctgctaccctcttctctctctctcggtgaagttgtgagtgcagattgcttgcgcggtttatcatgggggatagtcagtattcgttttctctcaccacatttagcccttctggaaagcttgttcagattgagcatgctttgacggctgtcgggtctggacaaacgtctttgggaattaaagctgcaaatggagttgtcattgctaccgagaagaaattgccatctatattggttgatgaagcatcagtccagaaaattcagttattaacaccaaatataggtgtcgtatatagtggcatgggtcctgattttcgagttttggttcggaaaagcaggaaacaagccgagcagtatcaccgtttatataaagaaccaattcctgtcactcaacttgtcagggaagttgccgccgtaatgcaggaatttactcaatctggtggtgttagg

SEQ ID NO: 53818 - DNA, 449 bp, Glycine max
  unsure at all n locations
  Clone ID: LIB3167-079-P1-K2-E11
gacttatgctacaagaaccatattttttttgtaagatgatggaactttgacaccatgggccgttgttttaagtaagccggatggtcatggtgaanaatatggtcctgttagcgaagtctacgtgcctgccagcgaaggagtggaagcttatatttggttactggcaaaggcttatgttgttgtgaatgatcatgctaccatcaaatcattagccattggctaagcactcatgcaattgttgagccatttgtcatagcaacaaacaggcaactgagtgtggttcaccctatttacaaacttgtgtttgctcactaccgtgacaccatgaatattaattcacttgcccggaaagccctggtcaatgcaaatggtattatagagaaaacattcttgtggggtaggtactctatggaaatgttcgctgtcattttacaaggactgggttttca

SEQ ID NO: 53819 - DNA, 301 bp, Glycine max
  Clone ID: LIB3167-079-P1-K2-E12
cttactcgtggtcttcaacccacttgtctttggtaaggatgagaagtccttgaaggggttgaagctcaaggaagtgaagaatggaaggttggctatgttggcaatcttgggttactttgttcaagctcttgtcacaggtgttggcccataccaaaacctcctagatcatttggctgaccccgtgcacaacaacatcttgaccagtctcaagttccactaaatgtattatatcatattctttaccctcttggtcttggttcttgttcgcttcgcagttaccaaagctcaaccacctttctat

SEQ ID NO: 53820 - DNA, 454 bp, Glycine max
  unsure at all n locations
  Clone ID: LIB3167-079-P1-K2-E2
atcaatttggtccgacctgccctctccatgcctgatcaccacactcgacaggtcacctctggccgtttgaaggaagctgtcagagcgcctctctcaaggccaggcgtctctcacccagagccacacagccttaaacaccaaaatgaattccatccactccttccttaacactaaaattaactccctcatagaccaaatcgcagccatcaccaccaaccccagctcaccttccccttcctctcagccatctccttctccgattcaccgtcctcacatgaaactggacgcacctcgtttcaatggtcacgacccgcttggatggatatttaaaatatcccaattctttgactaccagacaattctggagcaagagcctctcactgttgcgtctttctacatggatgggtcggcgcttcactgatatcagtggatgtctcgacaggttctnttcatc

SEQ ID NO: 53821 - DNA, 425 bp, Glycine max
  unsure at all n locations
  Clone ID: LIB3167-079-P1-K2-E3
cccactcgtccgcccacgcgtccgcccactctttcgcaaattgagccctaaagatctctncggggacgctgagagtttcacttgcacccttcngttctcgatgtcagcgtttgacaatgttgttggtgggaaattgaagttgaagggaaaagcactggatgtggctggtggagtgaagaagaagaaaaagaagaacaagagaaatcatgaacaacttctgcaagtcgccgaagatgaagtttcagcaggtggaaatacagaacaggccaaagatcctaatgatggagatataaatgatgtgagtgaatggagcgggggagggttgacagcccattatgatgatcatcttacaccggcggagaggcgattcatagtgcagtaggagcatcttgatgttcacagattgtgctagatttttaattaat

SEQ ID NO: 53822 - DNA, 254 bp, Glycine max
  Clone ID: LIB3167-079-P1-K2-E4
tcccacgctttctcccactcttccacatagtctttaccttaataagacattttcacgtcaagcagatcgtttaaaaaatatctaggcacgcgctcatcttcaaaagttacaaatttaaatgaactgcttatatatcttattactactatagccattcaacttgttctttcaagaccttttacccctcacaaggtttacaaccaatgttagcagcaccacctaaaggtttattccaaatactactattttttcta

SEQ ID NO: 53823 - DNA, 301 bp, Glycine max
  Clone ID: LIB3167-079-P1-K2-E5
cacaaacatccctcttgatttgaaggttgttttgtgcttatagataaaagttctgccaaatgaagagtggttttcagatcatagggtgtgtgtgtgtgttaaacaatggctaagttctttgctgctatgatcttggcactcattgccatttccatgcttcaaacagtggttatggctgctaatgagcaaggaggccacttgtatgacaacaagagcaaatatggaagtgggagtgtcaagagataccaatgcccatcacaatgctcgaggagatgtttccagacccaattccacaagccct

SEQ ID NO: 53824 - DNA, 308 bp, Glycine max
  Clone ID: LIB3167-079-P1-K2-E6
attccttgaagaaaggtcagattgtgagggtttacattgagaaatatctcaatagcctcaattgtctgtctgttgggcacccagcttgttacaaaggattagattacatttatgaggaccgtggtgaggtcctggatatgcgtatatttgaaacgggagaatatgcacttattgcgtgggtaggggtccccactgctccagcatggcttcctacttacatgcttatcaagttagtgaaactcaattatgatagtgtatgacctacagtttgttcacaattattatgctaaaatatttaatgggggggg

SEQ ID NO: 53825 - DNA, 436 bp, Glycine max
  Clone ID: LIB3167-079-P1-K2-E7
cccacgcgtccgtgaattaacatataattatggggttacctcgtatgacattggcgatggctttggacattttgcaatggcaactcaggacatttataaattggttgagcacatcagggccaagggtggaaacatcacaagggaacctggtccagttcaaggtggaactactgttatcgcctttgttaaggatcctgatggttatacttttggacttatccaaagacctacagtccatgacccattttgtcaagtaatgcttcgtgttggtgatttagagcgctcaattaagttttatgaaaaggctttgggcatgaaggtggtgaggaaggttgataagccttgagtacaagtacactatatctatgctcgggtatggagaggagcacgagacaactgtgttggagttgacatataacttttgtgtgactgaata

SEQ ID NO: 53826 - DNA, 412 bp, Glycine max
  Clone ID: LIB3167-079-P1-K2-E8
cttgtcccaaatgcataggtttaatctagtcaagaatcattatttttttcaaggcagggtatagtaataagctaaaagcgtagcaagctttagcttgaaggggagcattggaggccactagtcaaagtttatatcagaggaaactagtcaaaagtccatatttctggaatatgttattcaaaacataattgtgccttctttgtcagctcttcctttacttgtttcaagtcccattgtgttggttatattcttgttgtcatttgtttcaagttttaggatccttctttgttttgcttagaggaagtaacatcatggctagtattgctgtcattattggatggatgatgcaacattttcttgcattcattcttggacagaattgttgttggggttttgattttgagcaatatta

SEQ ID NO: 53827 - DNA, 193 bp, Glycine max
  Clone ID: LIB3167-079-P1-K2-E9
atctcatctcgtccatgtcctccgggttcttctctgtcggggctgttctatagcgagcggaagaccttttccgtgttcacgtcggcgctctccttcttccaccgtggtggagaagctggagtccgtggcgcgcgccctatgattcttggtcaccagggtgaaaggctgtattgtgaggatggaggccaaggcc

SEQ ID NO: 53828 - DNA, 73 bp, Glycine max
  Clone ID: LIB3167-079-P1-K2-F10
attcccggtcagcccactcttccataccttaatctcaacaatcacatctcgtgcattttaatccgcagtgtgc

SEQ ID NO: 53829 - DNA, 298 bp, Glycine max
  unsure at all n locations
  Clone ID: LIB3167-079-P1-K2-F11
tgagctctgcgagatcttgagtcgcctattttaaaagatgagtaagcttcaaagtgaggctgtgcttttagccatctcagaagtcattnccnattccaaggagaagaatcgcaaatttgtggagaccatcgaactccaaatcggtttgaagaactactatccacatattgacaagcgtttcagtggctccgtcaagttgccccacatccctctccccattattaaaatttgcatgctttttgatgctcatcttgttgaataggcatattatataggtctggatctttatttattttta

SEQ ID NO: 53830 - DNA, 369 bp, Glycine max
  Clone ID: LIB3167-079-P1-K2-F12
gccgtttctaattaatgataggtgtcaagtggaagtgcagtgatgtatgcagctgagggatgctaacataccggtacggggggcttggctatctgggctgtgactctacttggtcttcttgctggtggtgcacttcttgtctacaacacaagtgctttggcgcaataaactttgcaaatcgatgttttaagctcaaacttagtccatgtaactatctaaaaatgaagaattattcatgaagtactttgtggatacgtgttccttctgttctataaatgtgtggatgtgaaaaatcgtgtggggggggggggtgtaattttatttttttaattatatatattgtaatttttatttatttttttattattt

SEQ ID NO: 53831 - DNA, 450 bp, Glycine max
  Clone ID: LIB3167-079-P1-K2-F2
ctaattctacattaaaagaatggttacttatatccattcgattcgttttagttctatcaatgctatatgaataaatggattgggtatgtcaacaaaaacaaaaaaatgaaaattttcatttttttgttttgttatagatagtctgtatctgtttgctttaagaaaaaaagaaaaaaatgaaagaaagagaaaagcccaacctagatcataataaaagactcccaagttttcagtcggaaagagaagataaaaaactaagatgaaaaaaaaaaagaatcgaccattcgagtattcaaaatttaatgaaaaaataatagaagtaggggcatagaatcgaaatagatatgtggtatatatctgtgtatattgaattgtgaatagatagataatagaatcatttctaattcaagcaaataatggtatcgagtatagatgaaagaggtggatatg

SEQ ID NO: 53832 - DNA, 317 bp, Glycine max
  Clone ID: LIB3167-079-P1-K2-F5
gctgattccatacccttttcatcaaacaaggtgaatgaagtgttaaacaagttctccatcagggaagtgtcatatgaggctcgggctgggaagaacaccatcagtgagtgtgaagtgcctggcattaagggagaggaaaagcgttgcgtgacttcacttgagtccatggttgatttcgccactaccaagctcgggagcaacgatgttgatgctgtttccacagaagtgacaaaaaaagataatgagttacaacagtatacaatggcaccaggggttaagaggttgggtgaggacatggcttgtgggggggggggggg

SEQ ID NO: 53833 - DNA, 206 bp, Glycine max
  Clone ID: LIB3167-079-P1-K2-F6
gatgatgactcttgcagctagtcctttgactatattgtagttagcaagttctcacaaatcaagcgagaaaagaaacccttacgcggcggtatagatccattaaaatatcatcatttgaatttacaatggttttttaataaactttaaattgaatttcagccgttgcgatttaaaaaaaaaaaaaaatatacaaaaaaaaataaaaa

SEQ ID NO: 53834 - DNA, 375 bp, Glycine max
  Clone ID: LIB3167-079-P1-K2-F7
tcactctcttagccccaatctcttgatcagcataatcttcaggccaagccatataagcgagcgcatcacaaccccgtaggggctgctgcttctatccccatagctttctcgctgagctctgttatcaacaacaacaagccttcatccgaagccttcttcaggccactacccctacggcaaccaaagaggaccctctccaccacaaatgcagtgtcaaactccaaggctcaaatcaatgcatctttgaaggacaaggcagttgcatgactcacatcatcttctgtgacatcatctatttatgttccggaggtggctcatgctgcttaatatcaattctccccttccctcaagaactttctgcttagcatctttgct

SEQ ID NO: 53835 - DNA, 234 bp, Glycine max
  Clone ID: LIB3167-079-P1-K2-F8
tctcattttcaggtacccatttcgcatatccttatcaatcattcaataaatcaatcatgctagattttctttcccttccggacggtcattttcatccctctcaaaccctctatctttctcttatcctataatcttctacccaaattaacactaattacttaatcataaatttcttcacttttaacctttttcatcaaatcccaattcttcaaaatcccacctttttcttttttt

SEQ ID NO: 53836 - DNA, 462 bp, Glycine max
  Clone ID: LIB3167-079-P1-K2-G1
cgtaaccccctctttcaattattctccggtattctctcggcctcgaattcgagcattttccagcgagttcatgagcgcccccacgaccagctgcttcttcttctgcctttgcccaaagcatggcgaatttcgacgctgattccgtcacttaccttaagcagcgagatgccgcggagatcgacgagacactcatgggtccacttggcttcagcgttgaccagctcatggagttggctggtttgagtgtcgccacttccatttctgaggtttacaaaccgagtgagtatagtcgtgttcttactatatgtggtcccggtaacaatggtggtgacggtctcgtagctgctcggcacctgcatcacttcggttataagccatttgtctgttacccaaagcgtacccccaagcctctatatgctgggttagttactcagcttgaagcactgtcaatcccattcttct

SEQ ID NO: 53837 - DNA, 120 bp, Glycine max
  unsure at all n locations
  Clone ID: LIB3167-079-P1-K2-G10
attttatactatacccacattttgattattttttttctagttgataanccatngctactgaattatattctttaagttaacgaacccctcaaacccaacncanacaatttactatcaaac

SEQ ID NO: 53838 - DNA, 383 bp, Glycine max
  Clone ID: LIB3167-079-P1-K2-G12
aaaaaataataatggaggtgcagcaatttttttatgctcagattctccttcaggaatgcgaccgttttcttgtgtttccggaacgtaatcacttcaatcttcttgcttcatgcttttctcacctctgcttacacccgcaacaaattctccaacgctaactcaaactcatctcaactcaattacattaaggaatctgaagagattcgacttgccatgctaccgttggaactgataaaaagagtgagggagattgagcaggaagtatacactgtaccagaaactgtccatattatagacacaaagcttactgctgcagtttatctttctaaatggttaaaggtttttccgtccttgaatgattctgccatctttaaagctttttt

SEQ ID NO: 53839 - DNA, 303 bp, Glycine max
  Clone ID: LIB3167-079-P1-K2-G2
tcctctctggtcgacctgcgacctggttggcctgctttattcctaggggcaaatggattcaagggaagactaaatctttaattccaaactatggttgcttttgcttttttttttttattccttttggccgcaatctataatgataacttatctccttttctttactagaaaattggtattcccttcataagtgatatatattgtgactgctctaaaaaaaaaaaaaagcgcgtctaaggatcactacttacctctgcactatacttttataggtactaatcaattacggcgcgtttacactct

SEQ ID NO: 53840 - DNA, 436 bp, Glycine max
  Clone ID: LIB3167-079-P1-K2-G3
cccacgcgtccgtctacaatggcctcagccgcatcccccaccactttctctctcctccactgcgccgccccttcctcctcctgcaccggcacctccgcctccccctccccctcgcgcgtgcagctcacctcctccctccgcgcccgcccgctgcgccgcctgggcttcgccgcggcggacccgctgctcgcggcgagtgtagcggcgcgcgtggcggcggtgagaggaggaggaaagggcgcgaggggggtggtgtcgatggcgaagaagagcgtgggggacctgagcgcggcggacctgaaggggaagaaggtcttcgtcagggcctacctcaacgttccgctcgacgacaaccagaacatcaccgacgacaccagaatccgggccgtcattcccaccatcaaacatcttatccaaaacggcgccaaagtcattc

SEQ ID NO: 53841 - DNA, 414 bp, Glycine max
  Clone ID: LIB3167-079-P1-K2-G5
cccacgcgtcctcccactcttcctttctcttttcttcaagattatattcttgtcacgaagaagacgtgtcattcagtccgtaagagaggcaaacttaaagaaggcttgctaccacacatgggaaaaattaattctcaaggatccacaagatccttccactccaaatgcagtttcatacaaaacatcagcgagagagaaactgataaggcagggatacaacattgttgggatcattggagaccaatggagcgatctcctctgatgccacatatgctaaagctttacctttaagcttcctaattcggtggggtagatttagtttttccttcacctcttaacaatttaatcttgctcctatctatccatatttaataaagataccttaaaattttgttcacttaccttcaactttat

SEQ ID NO: 53842 - DNA, 413 bp, Glycine max
  Clone ID: LIB3167-079-P1-K2-G6
cccacgcgtccgctcaaccacccaaattcagtgtggtctgagagaactcagaacccgcattgattgcgtgaagaacactcagagaaggaccgaggctatgaagcttgtggctgcagccaaagtgagaagagctcaagaagctgttgtcaacggaagacccttctcagagaccctcgttgaagtcctctacaacatcaacgagcagctcctaactgaggacgtagacatccctctcacaaaggttaggcctgtcaagaaagttgcacttgttgtggtcaccggcgaccgtggtctctgcggcggtttcaacaacgcaatcataaagaaagctgaggctagaatcagggaattgaaggagcttggcttggaattcactgtcataagtgttggcaagaagggtaactcttatttta

SEQ ID NO: 53843 - DNA, 213 bp, Glycine max
  Clone ID: LIB3167-079-P1-K2-G9
ttccactcttccttattccttcaatgaataatttactttccaaatggattccattgtcagaaagtattcttattactttcagtaagatttatccacattttccttttttcattcaacttttttatcatactttacttattattatttcattaaatttattttttttcatttcctttttttttttttttctttttatattattcttataatttt

SEQ ID NO: 53844 - DNA, 452 bp, Glycine max
  Clone ID: LIB3167-079-P1-K2-H1
atggcagcaacattgatggcagcaacaacaagttctggtactcttaaagcaactcctttccgtggggaatgcaagggtgccaatgccgatgctcttagggatgttgtctccatgggaactgggaagtacaccatgggcaatgatttgtggtatggaccagacagagtgaaatacttgggacccttctcagctcagaccccttcatacttgaaaggagaattccctggggattatggatgggacactgctggcttatctgctgacccagaagcatttgccaagaacagggctcttgaggtgatccatgggcgatgggccatgcttggagcactaggatgcatcaccccagaggtgctagagaagtggttgagagtggacttcaaggagccagtgtggttcaaagctggagcccaaatattcttcgaaggtgggcttgactatttgggaaaccc

SEQ ID NO: 53845 - DNA, 147 bp, Glycine max
  unsure at all n locations
  Clone ID: LIB3167-079-P1-K2-H10
ggacaatcttgctcccttatcaatacattatctacaaatctagaacggctttnaaacgtctgaatttataatttcactgatcggtcccatcttctcccacaccctttaattatctcttctttcttacttcctatctcactccatctc

SEQ ID NO: 53846 - DNA, 422 bp, Glycine max
  Clone ID: LIB3167-079-P1-K2-H11
ctcactcttccactcactcattcactttactttaaaggcttgaaacttagtactggggaccgttctttttataacaagcgctgtgcttatttacataccaaacctctctttatacctatttctcactctatcatctctggaactcattttcctctgatacttatacataaacaattgaaacacaacttccaaaccaattatcgtattcacacaccaacttcaatgtactcatcctaaattctagagtatctgactcattaacatcttaaactaacttataaatcaaacaaagacctgaaagtgaacaggctcacaccaagccttttgcatctgtctatcaccctatatctggagctgctcactcttatcaaaggaaccatagctaatgatgttcccatatcttacattcacaattccttaat

SEQ ID NO: 53847 - DNA, 321 bp, Glycine max
  Clone ID: LIB3167-079-P1-K2-H12
cccacgcgtccggaattttctaataatggcgaaagacgttgagcaggtcacagagcggggtgaatactccgcgaaggacgaccatgaccctcctccggcaccgttgatcgacccagatgagctcacaaagtggtccttgtacagagccgccatagctgagttcatagcaacactcctttttctttacatcaccgtgttgaccattattggctacaagagacagagtgacaccaaaatccccggttacaccgaatgtgacggcgttggcattttgggcaatcgttgggccctcaggggcatgagcttcatccttggttactg

SEQ ID NO: 53848 - DNA, 462 bp, Glycine max
  Clone ID: LIB3167-079-P1-K2-H2
ttccactcgttctaaaaaaaaaaaaaaaaaaattatttttaaaaaaaaaaaaaaaaaaaaatagggaagaattaaataaaaaaaaaagaaggagaaaaaaaaaaaaatataataaaaaggggcccccttttaaaaaaccaaagtttacttacccttcattgaaacttaatattttttttttattgccacaaaaataaaattaactgcccgtttttttaaaacttcttaattggaaaaacccttgttttcccaaattaattctctttggaaaaattcccctttttccctgtttctttatttataaaaaaaccccaactattcgcctttctaaacattttcccaccttaaattgaaatttgaacccccccttttactcctaattaaccccggggttttttgtttttaccccaaaattaacctataattttgcaaagtccctaacccccgtttttttattttttt

SEQ ID NO: 53849 - DNA, 283 bp, Glycine max
  unsure at all n locations
  Clone ID: LIB3167-079-P1-K2-H3
tctactcgtccatctaatagtaaaaccaccttatctatcacacatacgaacactcattcaaagtctgttttcaatgcaatgagggttgaaccacatcaacacaacctcatnttcattcctaatgattctttgctttcacattaaaccaatttattataacagatcactcctttttttatctaaaaccatccactacatctactaaaaattgactatttattatgcaacctcacccctatatctaatcattttaatgttgatttcatttaaaacttcaattctt

SEQ ID NO: 53850 - DNA, 59 bp, Glycine max
  Clone ID: LIB3167-079-P1-K2-H5
ctccacgcttccttccactcctacccataatttttttctttcatacaaaacaaacatcc

SEQ ID NO: 53851 - DNA, 339 bp, Glycine max
  Clone ID: LIB3167-079-P1-K2-H6
aattgatagagtaataaccaaatttggaatgcccatggggcctttcagattgatggacctgggtgggtttggtgtggcaattgctactggcatgcaatttattcagaattttcctgagcgaacatataaatcaatgcttatttcccttctgcaagaagataagagagctggtgaaacaactcacaaagggttttatttgtataatgataaacggaaggctagtcctgatcctgaattgaagaactatattgagaaggctaggagcatttccggtgtctctgttgatcctaagcttgccaagtgacaagaaaaggatatcataaagatgttattctttcc

SEQ ID NO: 53852 - DNA, 304 bp, Glycine max
  Clone ID: LIB3167-079-P1-K2-H7
acatctctctatatatagcacacgtattaatttttttacccttcttccaaaggaaatggcagcataaattcataacctggactgcatcatcacattcacattttaataccttctctttctcccagtctctcacacacaacatttgaagaataaaatgtttcacatttattctctctctaaattcctttcatctacattctactcatctcaaattgcttgccacattattcttttattcttctaccataccataaatgtggtacacatatgacatttttcattttctcatctctaaactttttta

SEQ ID NO: 53853 - DNA, 411 bp, Glycine max
  unsure at all n locations
  Clone ID: LIB3167-079-P1-K2-H8
aaaccatttaggctctcttaaaacaaatgtccctcaaaccactttccccacactctttagtgggtcatttttttttttgcgctgtccccacaaagaggtcttggacccttcttctgtgtagtgcaatggccatggctaaggttttctgtgttctgcttctggcactccttggcatttccatgatcacaactcaggttatggcaacagattctgcttatcacttggatggaaggaattatggacctgggagtctcaagagctcacagtgcccttctgaatgcacaagaagatgtatccagacacagtaccacaagccctgcatggtcttctgcaaacaatgctgcaaaaggtgcctntgtgttcctcctggctactatgggaacaagtctgtgtgcccctgctacaataact

SEQ ID NO: 53854 - DNA, 431 bp, Glycine max
  Clone ID: LIB3167-079-P1-K2-H9
gcacttcacttgttctgcattgaccatagcttctctctttctttcctaattaatcctggcgtgcaaacaaacgctctctgtgatactcatagtgacacacacagcttagtttcgttgtattatatacagtctattcactcaaattcagtgtcacaagttctcaagattgttgtccggcactatctgcagcaccattcaattcttcactctatattggatacacacacttctagtatataccaagtgattgatgatgttgtcagcaaaatctgaatcggatatcacaagcttagctccatcttcaccttcaaggtcaccaaagcgccctgtgtactatgtgcaaagtccttcaagggattctcatgatggggacaagtcatcttcaatgcaggcaactccaatatcaaacagtcctatggagtctccctcac

SEQ ID NO: 53855 - DNA, 267 bp, Glycine max
  Clone ID: LIB3167-080-P1-K1-A10
ttccggggccgaccacacccttccgccaattcttccggcctacctcctcctttgttattggagggccttaaggacctaaggagggggttcctccaaggaaaatccttgattgcccttccaagcctttcaatgtgcaaaatgttgttaaaaagccttgaatccgccttacccccgggggggcaaaattggaacctatttgtattgccaagctgtaaaattttaaaaggaattccagtaagttaccttttggcctgataggtttttttt

SEQ ID NO: 53856 - DNA, 99 bp, Glycine max
  Clone ID: LIB3167-080-P1-K1-A11
aggcacgcgtggggaaaaattgctaatggggttttccctttccaaaggaaaggctaaaaccttaactgaaaggttggaaattaattcttcaatggttgg

SEQ ID NO: 53857 - DNA, 312 bp, Glycine max
  Clone ID: LIB3167-080-P1-K1-A12
cgggcccggatttccgggttcgaccacacccgtccgggttcttgggagaccaatggagcgttttcttggaaggccacaaaggcaaaagcaggacctttaagcttcttaatcccctgtcctacattaagtagttccttaacctttaaacattctagctggctccaatctatctatttgtaataggaggcgtccaattgggggccctagcttaactttatgtggtttaagctgggggcaaacaagtcatgtaagaaactcaactatgtggtttctttttccggggcttaattaaataatgcgccctggttccat

SEQ ID NO: 53858 - DNA, 100 bp, Glycine max
  Clone ID: LIB3167-080-P1-K1-A2
aaccaaaaaaaaatgttttttcaaaaaaaaaaataaaaaaaggaaaaaaaaaaaaaaaaaaaaaaaaaaaaaaaaaaaaaaggggcggccgttttaaaga

SEQ ID NO: 53859 - DNA, 51 bp, Glycine max
  Clone ID: LIB3167-080-P1-K1-A3
accgttcggccaaacgttcttccaagggttcggaattttttttttttcaaa

SEQ ID NO: 53860 - DNA, 288 bp, Glycine max
  Clone ID: LIB3167-080-P1-K1-A5
ttggttcttttttttagcgccggcctttttcccagttttgtgctcccccaaaagcgctgggtggcctttaatagggcgcgcctaatgcccttccgaaagcaccggacaaagccatacctttgcctttctagcccgaggccggggtcaacctgttgcccccccgggaccggaattacctgaaccccctcctcgagccggttgaccaaaccctaaccccctggggaagcccgttgaccccttccttaggaaagcggttcgtcccgcttgcccaaccgttaatcttccaaa

SEQ ID NO: 53861 - DNA, 333 bp, Glycine max
  Clone ID: LIB3167-080-P1-K1-A6
gtggctttataacaaacacctggtccttaacattgcagttggcatgggcggccaacgctgtggtttaaccgtcgccgttccaacctaagccctttttccggtaatccttttccggggtttccgtaaagctaactcccaaatccataacgctttaacgctccaagcccttaaccgttttggccgccaccaagaaggccgcggccgtcctaaaggggacctccgccgtcaaaggcgtcgccactctaatccaagaagacaatggcccgccaccagtttttgttcgaatcactggccttactccggggcttaatggttttaacctacatgggtttg

SEQ ID NO: 53862 - DNA, 215 bp, Glycine max
  Clone ID: LIB3167-080-P1-K1-A7
ctagttttttttgttttaaccaacaccaaggaaaccggggaaccttccatttaatttatttcaataatcgcaccaaaggattcattcattcaaaacccatggcgggcttaaggggcgacaaacccgttccttttttgggtttcctgggggccgttgcggccctggttttttcctgtttgggagcggcgtacggaacggcaaaaaggggggggggg

SEQ ID NO: 53863 - DNA, 80 bp, Glycine max
  unsure at all n locations
  Clone ID: LIB3167-080-P1-K1-A8
ggccgacccacccttccgttgtttcaaataacattttttaaatttaatttttaaancaataaataaatgccgggggcggg

SEQ ID NO: 53864 - DNA, 386 bp, Glycine max
  Clone ID: LIB3167-080-P1-K1-A9
cggttccggattccccggttggcccaaggcgtccgaaatggaagcctaattacaagctgaagttactttaatgcaaccaaccaaggggggcttggccattcgcaacctaaattttacacattgcttttttaaggctttgggttggaaacccgttgcagttaaactaatttgttcctttaagcccaacctaaaagatttggttaaaaaatgtgtcgacgccaccaaatttgcaggtttggcccttgccacctaagttttggttgtttttgaagcaggtgcaaaaggtgttccaaagaggttaaccttcgacaaattccaaagcaggacttactggaaagtgaagggacctggacctgttattaagggccaaaccttggagggtgggg

SEQ ID NO: 53865 - DNA, 223 bp, Glycine max
  Clone ID: LIB3167-080-P1-K1-B1
cggtctggattcccgcaaggttacaggcctcccttaaatattttttccctcctttgccggcttctttttcaaaagggccgtgacgtggggtttctccaccagaatcaggcctaaagtccttgaacgccttcctttttgggaaggcttacgtttctggggttcagtcaacaaaggacgccttcaaagggtttggggctgtttcggaaaacccagataactcttt

SEQ ID NO: 53866 - DNA, 209 bp, Glycine max
  Clone ID: LIB3167-080-P1-K1-B10
cgggcctggatttccgggttggcccacacccgtccggggattcaagggagtgatcgttgttaactggttctcaccataatcttaagcgtaaatggaagagtttcccattcataaccttttccgtcggaaggccttaaaaggcacctaacccggccccgttgaaggcggtttggattaagttattctaaaccttaattttcttttccgcc

SEQ ID NO: 53867 - DNA, 376 bp, Glycine max
  Clone ID: LIB3167-080-P1-K1-B12
cgggcccggatttccgggttggaccaacgcttccgttaacaagaacggcttcaactaatggttataaaaccgggggtgagtcaaggatccgggactggtttgatggactaagaaaatgaaggggctttaagtcgttttttaagcaacaagggtggggttttaagcaaggaggaacaggccaaagaaaacgtttacttccaaaaatgggaaagggggaggttggaaaaccaaaaccaccaggctgggaagaccaaggcagccaagggcaaagatgctgctgctgttaaaaaaccggaaggttctaaaaagggctaagttattccttaaaacaacccggcagggccacttggggggaaataagcttgttggagattaa

SEQ ID NO: 53868 - DNA, 376 bp, Glycine max
  unsure at all n locations
  Clone ID: LIB3167-080-P1-K1-B2
cgggnctggggtggaccaacccttccgccaacccttccgtactttaaactttccctttttttttttttgcctaaggggggccctgggaggacatggaacattggtaaaggctggggccgtccttggcagcaggaagggggcaactgaaactattaacttggtcaaggagggaaggggtccaaccacgcgaactgaatctttggctggtcttaagccgggtctccatggtttcaatgtccatgcctcggggagcactaccaatggttgcctttaaactggataacatttaaatcctattaacaaggagcttggggcccctaaggataagaatcgttatgctggggaccttggaaatgttaatgtcggggataatggt

SEQ ID NO: 53869 - DNA, 223 bp, Glycine max
  Clone ID: LIB3167-080-P1-K1-B3
aacccttccgaaaaacctaaattaacaaacacagttgcttttttttttttccagacccacctcaaattggcatggggggtggaggttccagttttttgtttcatcaaggagccagatcatgttgtagtcttttcaaatggcatttccaatgattcaggtcttgaagctggaagggaccataacatttttccagagtcttttgaacaaatcattgggactcctg

SEQ ID NO: 53870 - DNA, 354 bp, Glycine max
  Clone ID: LIB3167-080-P1-K1-B4
gatttccgggtagaccacccgtccgagaaactaaattaacaaacacagttgcttttttttctttccagtcccaactcaaaatggcatggggggtggaggttccagtttttgggttcatcaaggagccagaccatgttgtagcctattaaaagggcatttccaatgattcaggtcatgaagctggaagggaccataacatttttccagagtcttatgaacaaatcaatgagactcctgaacattattagttcaaaggaaagggcaaaggattatggggggaaggaaggtccaccagaaatttcgtgtaaggcctctgatgtccctaaggttaaaaattgggagggtaagttaacc

SEQ ID NO: 53871 - DNA, 400 bp, Glycine max
  Clone ID: LIB3167-080-P1-K1-B5
cccacgcttccggtttggccttcatccaaagggaagaccaaccttccaatcaatggcggttggaaagcttaaagcttaatggaataacccagttgggcctaaaaccattaacttttgggcacctacctttaaggggggcttaagctttgccaacattgctgttttttaaaaaccacctgagaaactttcctttcctaagcaattagcggccacagttcctggatttttctggtctggttccagaactgtattaaccccaaaaattgggaccctgtttagggtaaactttgcattggcggggccaggcttttcccaactttaacgcaattggcggcttgatttttcctaagaggcggaggtgaaggccgcaccaaaagaatgaggttaaattttttaaaat

SEQ ID NO: 53872 - DNA, 322 bp, Glycine max
  Clone ID: LIB3167-080-P1-K1-B6
cccattcttccgcccacccttccgaaaaaggttcagttggttccttggaaaatgaaggcttgcctggtggggccccgaatcaattaccttgcatgtgggttttacctgggccagctttaagggtcttggaggctaaggaattaaaatcggaagggtttcctttcccaggacctttaaatggggcaattgttgcggtatgagcttaaagagcctgcctccgtggttgttccacagggaaaagtggctggtttccctttacaaattggggcctttcaggagacccaggagcaattccatccattaccaaccttttttctgtggg

SEQ ID NO: 53873 - DNA, 366 bp, Glycine max
  Clone ID: LIB3167-080-P1-K1-B7
tccgggtccgaccaccgtccgattttgaataccataaaggggtggttgggatgggaaatgccaatttagctgagaaggttcgagggagaaagatggcgccttagggcccaaaacggggaagtgaccggcttaaagatgcttgttgcaaaaaaagaaaaggaccatggtgttgtttaaacggcttcaaaacttttgtcctaaaggagccaccagatttagttctgagctccctggttaccgtacggtggacctgttctccaagattcggaccacaaaggccctttctacggaaaccagttacacgggttttattttgtgggcggaatttatggccttaatgatcttttggggggggaacaaaaggtc

SEQ ID NO: 53874 - DNA, 379 bp, Glycine max
  unsure at all n locations
  Clone ID: LIB3167-080-P1-K1-B8
cgggnctggatttccggggcggaccacacccgtccggggatgggagcctttgacgggggtttgcttttcatgcccaaaggtttcatcaaaggctgaagagtatccgaaaaagaaccttgctgtaaagaaggcacttaaagccagccaatccgggccaccggataggttatttgggtaagctttataagcatccatccttttttggctcggcttaggcgcttttttggcaaggaggaggttaccttaaaaacccccctgaagccttgcgccgctaatccaccaatcgataagccattgattggccggtttgagggggagatccttagcccgcaatttttccacccccaggtcaaacaaagggataaggtttcggaccttt

SEQ ID NO: 53875 - DNA, 378 bp, Glycine max
  Clone ID: LIB3167-080-P1-K1-B9
cgggtctggatttccgggtccgaccaacccgtccggacattccagggattgatttttttttaattgttcgcagcttatttttaagccagactggaagagtttgccataattaacctttttctctcgacgcccattgggtaaagctaaaaagggcccaaagttggctgttttgaaaaaattgttccctccctaagtattcaaatgctccaactaagagtctttgaccccataaaaaaaaattcttttaaaggaaagtgtccccccaattgtgccaaataatctttaaaagcttcctttaaattgcaccattgtactgggacccctttattgggttttggtggccacaaacttaataaattcttgaatccaaattaattt

SEQ ID NO: 53876 - DNA, 378 bp, Glycine max
  unsure at all n locations
  Clone ID: LIB3167-080-P1-K1-C1
cccaacccttccaagggtttttggttcaaagttcaaaattggggtgaggttaaaaacatccccgttccggaggaggaaacctggaagattggaatggaatccagacctgtttttgaagttgctgggccattggcaattttggttaaagttaagggacccaagtttaaagagattgttaacattcgcttagaaaaaggaactactcgggttggacaagccctagaagttgatggggaaaaggctgtngttaaagcctttaagggtccatttgggattgacattaaatttacaactgggcaatttactggagaggtgttaaaaactccaagttcattggcaatgcttggccgatttttaaatggttcgggaaaaccaatt

SEQ ID NO: 53877 - DNA, 131 bp, Glycine max
  Clone ID: LIB3167-080-P1-K1-C12
gaatggattcccggggccgcccacacccgtcctaaaggtggcggaatgaattatttttttctttttgcctaatgcctaccccctccagagagcaatttcctttgcataacctcctctcccaaagtcttaac

SEQ ID NO: 53878 - DNA, 339 bp, Glycine max
  Clone ID: LIB3167-080-P1-K1-C2
attaaaagaaaaggataccggaatggtcggaggcaaaagacccggcgaccaagcttttcgggaggacattcccggtgccggagtttttgccgggttccaacggggctccggtttcgttttccggtgccgttgttgttgttgccagggttgaccctttttccaccaacttttaaagggggtctattcccaccccagttgcccaggagaaggttttggttagggccactttgggggaaaacccacctgttgccaggagggaggttggggcccccgcccattcttcagaggaggtcaccattccaattcctgcctttggaacctgggaagattccatcttcc

SEQ ID NO: 53879 - DNA, 287 bp, Glycine max
  Clone ID: LIB3167-080-P1-K1-C3
gggccgaccacccgtccgcccattcttccggaagggactcaattttccttttccttttcctaaccccccaaaacttgccgggcaagggggttcctccgttctttggcaggaaccaggaatctttcaaaggtgggccccacgggattccttggcttgcataatcattgtccaaaaaaaatatctccggttccactatagaaggcccaaatctggtgtgtagttgcggaccttccacttgttcggaaatttccaaggctcaagaaagaccctctggcatagttggggag

SEQ ID NO: 53880 - DNA, 287 bp, Glycine max
  Clone ID: LIB3167-080-P1-K1-C4
gaattccggggtcgcaccacacccgtccgggtcaatgggccaactttcttctcctttaagggttccctttcggtgacccctttccagaccggaattttccattttttaggatataaccggcgagatccgggaatctgaaaaaggccggttcctcctcgggaggggaaggttcccttggcaaaatgggcggggcaggccgagcgttccaaggagagggtggagttcatgaaaaaggttccaaatcctgggtaggctttgtattggccggggtttgacccttttccttt

SEQ ID NO: 53881 - DNA, 301 bp, Glycine max
  Clone ID: LIB3167-080-P1-K1-C6
gaccaaacaagattcaagagagagagggtttcctacgttggcctttgaacagccaccccggaggactgaattttccaaaccctaaattcaaactttttttttttttaataaatcattcaatccagttccctttcggttgggattgggattttttctcagcactccaaaaactgaaaagttttttgaagatggggaaaatgcctgccttagttttggttattcatccattcaagggtggcgtgcaccattggaagatgctcatgctgaatatactgtcctggttaagtccacttaatttttt

SEQ ID NO: 53882 - DNA, 333 bp, Glycine max
  Clone ID: LIB3167-080-P1-K1-C7
ttcccgtccgaccacacccgtccggggattcaagggattgaccggggttcacttgtcctaaccataatcgcaagcgggaatggaggaaaatcccatccataaccatcgccgccggaaggcctaaaaaggcaactaaccccgccccgttaaaggcggtttgggctaatttatattaaaccttcatcttcgggtccgccggctaaggctccggcttggcctacatcaagctaacctccaacggctctgccacccttgccggcctaatttctgcttttattggcccatgctttggccttttttcgtggcctttttctgttggtttcaaatattttt

SEQ ID NO: 53883 - DNA, 66 bp, Glycine max
  Clone ID: LIB3167-080-P1-K1-D1
cgctccggtagtcccgattttcaactataaaagaaaaggttcaaaattaatgggtaaccccgtccc

SEQ ID NO: 53884 - DNA, 337 bp, Glycine max
  unsure at all n locations
  Clone ID: LIB3167-080-P1-K1-D11
cgggnccggattccccgtccgccccacccttccggcctccattgaaccttgggcccatgtagtttttcaaaaccaattttttttaagaaaccaaggccgtttggccttggaggtttattcctccctctccctgttcccttagtttaactgcttcgcctccgccttccgatgggatctttttttttcataggcggtgtttgatggaggattatattccttctttcctatggtttgtttcccgttattcctcctttttctttatgtttccttctttctttcttattctttatagtgtgatcattcttcttttttacttttattttttctttctttcatt

SEQ ID NO: 53885 - DNA, 245 bp, Glycine max
  unsure at all n locations
  Clone ID: LIB3167-080-P1-K1-D12
acgggnctggattcccggggccgacccacccttccgcccacccttccgcccacccttcctattttttactttgggggttttttggagggggaaaaggttaattttagaaggagggtgcctccctaaggggttgtttaaccctctgttggcttggttaacccgtaaagcccattgttggtcgccaaaatggtttccaaatggtaatgtccgttccaatcaatggggggttttttcaattattgttt

SEQ ID NO: 53886 - DNA, 364 bp, Glycine max
  Clone ID: LIB3167-080-P1-K1-D2
acccttccggaggtagatagagtgaattttaaccccatttttcgcctcttatgggaaccaaagctctgttaacctggctcactactcctttgatgttgaaccaattgggttccttccgcccttgctttctggctgccgttccccaccactggcactaattgcgtctccgttgaattccaccacaccgccgccgttttggccaactccgtcgttttccccagtgatcaagccaacaacctaacaatggccggtaaggtgccatcaccgtttggaaccattctttattccagggggaccccaccccttggttttttggcttttacaactcaagaggctgggacctaccttgcttgcttctgggggg

SEQ ID NO: 53887 - DNA, 349 bp, Glycine max
  Clone ID: LIB3167-080-P1-K1-D3
ttgggtaagcccaccgcttccgaaaaaaacaggtggtggaaacctaaaaagaaggaattggtttcctaaaggacctcctcccaagttgttacaaccgtaaaccgtgccggtgccggattggttgttcaattaaccggcctaaaatccatggttggtttccccacgaggaagaccaacattgcctttacctccattgttggcaccgggggaggagtccattgcttgcaggggtggccaccaattggcaagaaaaagttggggactttttcttacttgccagacctggatgatgcccaattggcaaaggaggtcgattcccttttaaggaaaggatggattccttgcttgg

SEQ ID NO: 53888 - DNA, 244 bp, Glycine max
  Clone ID: LIB3167-080-P1-K1-D4
gattccgggtccgccccacccttccgaccaggcttattggtgggggctccaacccagccgggcctcctttttagttccgtccacgggcgcgggtacgctttgaattcttcgcgggcttttggcttttccgttgccagccttttgttctgtcttaccaattggccaccagggttcaaattcctaccaccatttcagcactcatggctttgatggcagatgaggatcctgtagttggatttttgtt

SEQ ID NO: 53889 - DNA, 253 bp, Glycine max
  Clone ID: LIB3167-080-P1-K1-D5
acccttccggctttaggctttgttattccgttccaagggggtaggattgagttcccaatttttgaaagggcgggggtttcccatttttaaattgtccggccaccaggtgcccctaataactctggaggggttcagctgcctcgaaatgatggaaaaatggtggggtctgatttgcagaaccctatgccttttgaactaactgagcgacctaaactgaagttgctcccaagggcaaagccagtggaaagtccaa

SEQ ID NO: 53890 - DNA, 349 bp, Glycine max
  Clone ID: LIB3167-080-P1-K1-D7
ccgggcctggatttccgggtcggaccaaggcttccgccaacgcttccgtcaacgcttccgttcaaagcttccgttattttcaaagattaaggtccggggtttcggaagcagccacagttggctcgtccaaagcaaaccgttcgtaagtccacaggaggaaaggctcctaggaagcagttggcacccaaggttgaacgtaggtttgaaccaactactgggggggtgaagaagcccaaccgttttggtcctggtcccgtggtttttgtggaatttaggaattcccagaagagtcccgagcttttattccgaaagctccctttccaaaggttgttccgggaattggttaagg

SEQ ID NO: 53891 - DNA, 352 bp, Glycine max
  Clone ID: LIB3167-080-P1-K1-D8
tccgggctggatttccggggtggaccaaggcgtccgtttcctttttcaacatgcaaaacttcagggttcggagtcttttctttttggttacgctttgaaaatgccttttttttgttaattccaacgatgacatttttttcttaccgggtaaactccttgacgttgactaagggggtggaactgttaccgaccaaaactttaactccaagcgggggatgggattcctgaccaacccgggggacggtgcttttggcgggttaagaaacgcaaccggggttttttacatggccgcctcttacgttaaattcggggagtccgggggggctagagttattcccctaatttacattgg

SEQ ID NO: 53892 - DNA, 312 bp, Glycine max
  unsure at all n locations
  Clone ID: LIB3167-080-P1-K1-D9
ccgggnttggataccggggcggacccaggcgtccgttccgattatcggaagggagggtcccaaggtttactaatcgaaggcgccctagtggggctacggaaatccaaccagcaccgggtggttagaacccctgttgggaagtgtgatgcccagcccacttagaagggggcagggggccttattgagccttgttacgtggaggaggttccaagggattccaaattagggaccggctgattccataaggaataggtggcttaggaaccgctggtccgtaaacctggcttttgggggggtttgttccgggggagc

SEQ ID NO: 53893 - DNA, 273 bp, Glycine max
  unsure at all n locations
  Clone ID: LIB3167-080-P1-K1-E1
ttcggccaaccgttccncacaaaacttcggatgaagagaggcaagagtcccttattgggaaggtccttgcgttttgggaagaacctaagaaccaaggtaaaaaattgttttggaaagtccaccttcgggggaggacctgtggggaagttagtgaaaaagcggtttaggaaaaattattaccctgtttggggcagaagctttattcctggttccactttacttgtttaaggatgcaaggggtaattttttccctccgtttaattttttgacccc

SEQ ID NO: 53894 - DNA, 354 bp, Glycine max
  unsure at all n locations
  Clone ID: LIB3167-080-P1-K1-E10
aacgggnctggatttccgggttggcaccacacccttccgaaaatttcaaggccttacagcatgtccagaaaaccccaaataaaattggccctgcgggaaggaagcctgggaagaagtccatgaaaccagaccctaaactaagaaaaaactactttgcaggggtgtagctgggttattagttaaaaggggttttctgcatttgtttaaataagggattggcaaaagggcctggtttttttaaaggtttggtaagtccttaattttgaagccgaagggtttggtattttgcgtgctggtgtacggatttttagaagggaccaatgtttaaattggaattttcggtctatttttacc

SEQ ID NO: 53895 - DNA, 125 bp, Glycine max
  unsure at all n locations
  Clone ID: LIB3167-080-P1-K1-E11
tgggnttttattcccggggccgccccacccgtccgctcccttgttgaaatgcttatccttttttatttcccccaatcaaatttaccataagaagatgtctttttttttgaaattccctccaatta

SEQ ID NO: 53896 - DNA, 296 bp, Glycine max
  unsure at all n locations
  Clone ID: LIB3167-080-P1-K1-E12
ttgggttggaatcccggccgacccacccgtccaaaactgggccatttaaacgttttagcaagaacttttttcttaaaaaaaggaaaaaaaaaaaaaaaaaaaaaaaaaaaaaaaaaagggggggccgtttaagaacaaagttccaccccgggcttgcaagataatcttttttttagggacccaaaataatacaacgggccgcggtnaaaaacttcggcctgggaaaaccttgctttccccaactaatggccttgaaaaaaatccccctttgccagctgggttataaccaaaaaggc

SEQ ID NO: 53897 - DNA, 409 bp, Glycine max
  Clone ID: LIB3167-080-P1-K1-E2
gcagtttcccataactatgcttttaaccatccacatcctcaaccagaatggtggtcctaagaggaatctaaaatccaccactggcttggaccatgggcaactcttttttactttaataagctaaacctatgctttttttttaacacaagaccagtaaaggccacccccatttcctgtgccaggctgctgcttcttttgcagtaaaggctgattccgtggaggacccagcaccaattgtgaatttccagacttctttgagttttcccggtggctaaaatccattaccttggttgggaccaggttccagggaaaaagttttggcgattttgggggccaaggcctatgctgcaggttggtttctagaccaatctttcgccctggattggaatgctgggaaagggcattcaaa

SEQ ID NO: 53898 - DNA, 200 bp, Glycine max
  unsure at all n locations
  Clone ID: LIB3167-080-P1-K1-E3
cggcnctggatttccgggtccgccccacccttccgtcccattggaatttttaaaattgccggggttaaccttaagattccaattttggaaatggattaggtaaccattttattgggttgggccgattggtttcaaaaaaagggggtcctacctcccatttctttttttttttggatttacccgaccacctggcttggttt

SEQ ID NO: 53899 - DNA, 103 bp, Glycine max
  Clone ID: LIB3167-080-P1-K1-E4
cctcccaaaaagggtcaaacctggaaaggcctttctggtcccaaccccctaaaatggccctcatgggttgcctccacggtttttttaacaccctcccatgttt

SEQ ID NO: 53900 - DNA, 235 bp, Glycine max
  Clone ID: LIB3167-080-P1-K1-E5
aaggaaaggaagggagtagggagtgagtatttttgaaattaaagaggaaggcttgaaccagaggaaaaagatgtcataattttaagccctggccaggcaattaaagcagttgaggaggggtgggccttttaagagagttaaatgaaaggggctttgcctaaaagccatgaaatacctcgtcgaaaaaagcaccgttaaaagggtcaaccttcctgcaaccttttggggggatttt

SEQ ID NO: 53901 - DNA, 338 bp, Glycine max
  Clone ID: LIB3167-080-P1-K1-E6
tttccgggtccgaccacacccttccgccacacccttccgatggttggtggtggaacctcgtcctcctcctttggtggtcctgggttggggttggtttttcctccaaccggaaaatgtcttgctgcgggggtacctggggttgcggaagctcctgcaggtgcggcaccggctgcggaggttgcataatttccccaaacttgtgctccactgagtcaaccccccccgagcccttggtcatgggagtggcccctgttaaggctcaattgggggtggctgaaatgggtgtgcccccttggaacgatggcttcaattttggcccaaactgttcttgcaacccc

SEQ ID NO: 53902 - DNA, 270 bp, Glycine max
  Clone ID: LIB3167-080-P1-K1-E8
ccacgcccccgtacccattggaatttttaaaattgccggggtttaccttaagattccaatattggaattgggagaggtaaccattttacctggttgggccgaatggtttcaaaaaaaggaagtcctaccgcccttttttttttttttatggatttacccaaccaactccctttattaaaaaaaaaaaaaaaagagcccttttgttcattttgtcctgaatcctccttaaaaaaaaaggccttcctttgttgctgccctgggaatttgttc

SEQ ID NO: 53903 - DNA, 235 bp, Glycine max
  Clone ID: LIB3167-080-P1-K1-E9
gaattccggtccgaccacacccgtccaaaaggcaactccaggttggtcggcattcctgtaagcggaagagcaggcggttcctggcccgggggttccttcggttaggcctgggcacaggcccctccggcaaggcggttcctgccccggcggcgatgggggtaaggccttcccacaagcggttggtggcccactccaccaccccgcggaacgatggtcctttcaaaaagaacaaccc

SEQ ID NO: 53904 - DNA, 334 bp, Glycine max
  Clone ID: LIB3167-080-P1-K1-F11
tttccgggtccgaccacacccttccgcccacccgtccgtttaactccaactttgcttccaataaataccatcggcatcagagaatggacaaacttgtattccttaactgccacaccacttcttttttttttttattttaataacaccactttaaagccaaacctaaccctttttttgggggcaattccaccttttaggccattttccttaccctgaaaaagaaaaacttgtttaacttcaaaagccttattttaatccacaaataagaatgtcttaaagctttttaacataacgtctagcttttaagatttccttaggcttgcaaattttaatt

SEQ ID NO: 53905 - DNA, 423 bp, Glycine max
  Clone ID: LIB3167-080-P1-K1-F2
cgggccgggatttccgggttggaccacacgcttccgccacacgcttccgcccacgcttccgccaacgcttccgaagattttgggttggggctgcctcttaaggtggcagcttccaccacaaactcaaggggggcctggttcaacacaaaaaaccacccttttaggcttttgggaagggcttaaaacaagcctgcagggggggaacccgaaaccacaacccttccagctgaagctgaagcaaagccaaaaccaccaccttttggccccaaaagaggggctaaggggaagatccttaggaaggattcctactggtccaaaggccctggttcaggggttgctgttgatcaggacccaaacattggttaccctgtgggggttcgattcaccaaagtcaactttgccatatgttcaacaaacaacttt

SEQ ID NO: 53906 - DNA, 219 bp, Glycine max
  Clone ID: LIB3167-080-P1-K1-F3
tgaaccagagcagttttgttcctgctggaggatagtaacattgaaggaatggttcctgatataatctaataaaactttccacagatgtcagttgagcgcatagcacgtaacatgtttcaaagcagagaagttcttcaaattgaggtttccatgccacctgttttcccaattggccatgcaatggaaatggcaaagctagcaaagaaagaaatttttaag

SEQ ID NO: 53907 - DNA, 209 bp, Glycine max
  Clone ID: LIB3167-080-P1-K1-F4
tccggggccgcccaacccttccggtggttgcaagtttcccaataccctagctttttttctgcttacgtttttaaaactaggacgaagtccaaattgaagcacgccctctttaagaaggttatgggcctccctgaaacaagaggccagagtagcccagcttagtgagaatttcttgaacgtccagagccgaaaaatgatgaggaatgcaa

SEQ ID NO: 53908 - DNA, 392 bp, Glycine max
  Clone ID: LIB3167-080-P1-K1-F5
gcctggatttccggggcggaccacacgcgtccgcccacagggtttggggagagaaaatattcctccaaatttttggccaaaaggcctgggagattccctggtgttagcccaatgaagatatttcctgtcccaattggcaggacaggtccagttgacgcggttttatggcagaaattatggggaaattggggggaggcggttggcaccaccgccggtggttccaccaaagataagctgaagcatgctctaaagggtttaggggccttcctccctggggggggggccacccgttgttttggaagggtggatgccacccacgccggtgagtttggtggcgctgaaatggaacctctcctccaatatctccggcctcatgggtttggaaaatattc

SEQ ID NO: 53909 - DNA, 236 bp, Glycine max
  Clone ID: LIB3167-080-P1-K1-F6
ccacccgtccgggaattttataagaagactttaagggaatctttagaaccactggcacttcctaacttaactaccgagggggaggtggagtccaaaagtttcctgtccgtcccgggaatggaacctcttaccattgaaaaagtagggacccctaaaccaaaaaacatcccctggtttgttaagcgggtttccatttaaaataatttggatgggaagctgtttccacgttcacctga

SEQ ID NO: 53910 - DNA, 287 bp, Glycine max
  Clone ID: LIB3167-080-P1-K1-F7
cggatttccggtccgaccacacccgtccgaactggcaagctgtttaaccttatccaactaaaccctgcaatttatggggtggggaaagggggaaagccagaattcaaccttcttaatgtgggcttaacccgaccaccatttcctaccacagtaaccctaatccgttattggaacttttttcctccttttttttttcccctaaaccatgctaattcccgccacttaactactccttttcccccttaataagaaacagaaaccccaatttccgaattttcgcgggggcc

SEQ ID NO: 53911 - DNA, 337 bp, Glycine max
  Clone ID: LIB3167-080-P1-K1-F8
gatttccgggtccgaccacacccttccgccccttttggggctgctgtttcaatttttaggttggacccttttttgaaggtttgaggggcttttttttaacaaaggtccttaaaaatgaaatggttttgctaaatcctccacctgggttggggatgggaaaccccaacctctgccttttggttctgcccccaaactcttcctcaatgaatgttaatggccagggatgcttaaacttaccacctgtttttagccactttcaacctgtggtggtgtgcggaacctgccaaactgttttgtcccaaccatcaggggtccgtgcaaggttaaccgaaggtgg

SEQ ID NO: 53912 - DNA, 355 bp, Glycine max
  unsure at all n locations
  Clone ID: LIB3167-080-P1-K1-F9
tacgggntggatttccggggccgaccacacccttccgatttaagggagggaccggggtcaatttgacctaataataaccgccagcgtcaatggaggaagatgccgttcagaaccatcgccgccggaaggcctgaaaaggcaactaaccccgccccgttaaaggcggtttgggctgagttaatctaaaccttaattttctggtccgccggttaaggctccggcttggcctacaacaagctaaccgacaccggggctgccacccttgccggcctaatttccgcttcattggccattgctttcgcctttttggtggcctgttccgtgggggccaacttttccgggggccacttaaacc

SEQ ID NO: 53913 - DNA, 353 bp, Glycine max
  Clone ID: LIB3167-080-P1-K1-G1
accctcccgagtttttaaacggttatggcccacttaaattccctaccacttggttttttccttttagggaggagggtttgccttcaaaaggaattcccaccagtttctttttttaaggaccctatggtggcttaagtcctgtcccgggttttaaataaatgggaaattgaaggacccagtttccttattcagtggggtttgcttaagccattgttttgaaggggctgaatgtttttgtattggccattaataaagaaagtggggttggttttaaaaaaaaaactcccttttctaaaattccatttgattccaattacctttgtaaataattaaattgggggggcccttttaaa

SEQ ID NO: 53914 - DNA, 326 bp, Glycine max
  Clone ID: LIB3167-080-P1-K1-G10
gatttccggggcatttgggtggcaaagaccacctaagccttaaaagggcacttcggttgtggaatcccggtggttggccgttaggaaacactttttttttccttaatggaaccgcccccgccggatctgttcctccttcctttaaaatttggctgcatggggcaggaaagggttggtttcaaggttggatcgcaggttcgaaaggaaggtccattttttttccaaggggaaggaggctgttccctcctggggtccccaaaagttttttcctaagaaaaggaaaaggggctaccaccaagggcggcggaccaatttgagggctttta

SEQ ID NO: 53915 - DNA, 362 bp, Glycine max
  Clone ID: LIB3167-080-P1-K1-G2
tgctttcaaaacaaaaaagggcggccataagtggcagtttttttataattggcatgtggcccctgcagtggacccattctttccaatgctcgaatcaggtggtttgtacttgggtggctgggatttggggttccaaatgcattggcaatctttcctttgaataaaggttccattttttgatagggttgactttggttgggccaaggcttgaatttgagccaagatgtggaaagtcctttagtggggatggaagcagtttttaagcaccagttggttgcaggataatcccggttattcctttttacgggggaattttggtttaatttggccctccccagaataatttgttccttttttatatg

SEQ ID NO: 53916 - DNA, 299 bp, Glycine max
  Clone ID: LIB3167-080-P1-K1-G3
ccacccttccggggaaagaaagttttttttttcctgccccggttgaccacggggggaaaatggcactgctgccatggctcaaggttccacccctcctgaccattgaaatctaatttttaaatcttacatgacgctttggaaagatttaaatttttcttataacaagttcattagaccacctgttagcaggcttgaagcatttgggaaggaattttcctcaaaagggcttgccattggggccatttaccgagctgtttttgacggccttttttgggtaacctgggaggatttttaaggtt

SEQ ID NO: 53917 - DNA, 343 bp, Glycine max
  Clone ID: LIB3167-080-P1-K1-G4
ccacccttccgtttaaaacccctatttggttccacctagctttttccttaatttcctcatcatcaatatccaccaccatggctattttgcaaggagggcctgcctttgccaaaatctttaacttcctttccatttgcatccttgctttaataaatgaaggctcttcctccctttcaagggcattcatgaatgaaccatggccttggggcctaagcattcccataagtttgtccgtgaaattccgccttgggattcacactcaccttggaatctgcgtgggggtgggagtcccctctttggccttttggggggccccccgtggggccattgtttggtcctggga

SEQ ID NO: 53918 - DNA, 353 bp, Glycine max
  unsure at all n locations
  Clone ID: LIB3167-080-P1-K1-G5
tccgggttggaccacaggcttccgcccacgcttccgattcaatagacatggccaccttcacttttgaagccgtggttattccctaattaactggcctaaaggcaggcgcaggcaaagtgagtgccgcagttaaagcttaagttccccaagccacaaggtggggcttaaaggcttcgctaaaagacgttgaagtcgctgttggggccactgccgcaagtgcagtgctggctagcaacgccatggccattgaagggttgctggggggggataacgggtctttggctttcgttcccaacattntttccggggcctttggggagaaaatcgggtccaagaccaccccaggtttcccc

SEQ ID NO: 53919 - DNA, 215 bp, Glycine max
  Clone ID: LIB3167-080-P1-K1-G7
aaccaacgggtggaaaaggcaaatgagggcttggttctggccaatgaaccactttaggccattggttttaggccattgaaactaacaacccctagcttgggggacctaaaccatctgattcttgcacccatgaggggggttacctgtggtctgaggtttccgggccaactgaactttgacctaaggaagctggctggaaatctgtttccatttcc

SEQ ID NO: 53920 - DNA, 239 bp, Glycine max
  Clone ID: LIB3167-080-P1-K1-G8
gaactttcaaggcctaacagtttgtgcaggaaaacccaaataaagttggccctgtgggggggaagcctggggagaagtccatgaaaccagaccctaaacttagcaaaaactactttgcaggggggtagctaggttattagttaaaagtggctttctgaatcgtgttaaatcagggaattgcaaaagggcctggttttttttaatgttttttaagtcctaaaatttagagccgataggtt

SEQ ID NO: 53921 - DNA, 201 bp, Glycine max
  Clone ID: LIB3167-080-P1-K1-G9
gattcccggggccgaccacacgcgtccgccacatcttccgttggaagttgaattattgtttaaggaaagaatggagccgggcgtggagggtacaatttttattctgccataacttgtccagtgctatggaaaggttggccttcctattaaattttttaaaccttttaattaatttttagtattgggctatatatctattac

SEQ ID NO: 53922 - DNA, 292 bp, Glycine max
  Clone ID: LIB3167-080-P1-K1-H1
atttccgggtcggccccacccttccgcccacccttccggcatgttttttttttaggaaggggaacctttttgtctaaagcaccttagggggcatccaacctcaaaccatggtggttattccaacaggtttttggttgcccatttagaggggctgcttaacccccttatgggcacctggggctccatcctcctttaaagaatggccccttttttctcatattggcctttttccatggccgaaaaaaaaaaaaatggtgtcctgaagattgtccagtcccaccattttattttt

SEQ ID NO: 53923 - DNA, 269 bp, Glycine max
  Clone ID: LIB3167-080-P1-K1-H10
cggtccgaccaacccttccggaagctctggggttgggttttcccctaacttttttcccgcaccggggtaaagtcgggggaagcggtttgtttaagaggccggtcttaaaatattaagggggggggggctggactccttgggcaccccaagcctgttccttgcccaaagctttcttgccttctgggccacccaatttatttgtatgggggccgttgaggtttcccgttttgctggtgggccctttgggaaggtgatttgtcccaattttt

SEQ ID NO: 53924 - DNA, 203 bp, Glycine max
  Clone ID: LIB3167-080-P1-K1-H2
ccacacccttccggccagagcaaaaagaaagattcccagcctaggtgaaagatggaggggaaggaccaggttttgtcgttggaagcaaccaagttccccaagggccagccatttggaacggcggcccaaagccaaaacaacggcagaggcctaccagaagccggccccggcccctttgtttgacccaccggagtttacgtatt

SEQ ID NO: 53925 - DNA, 97 bp, Glycine max
  Clone ID: LIB3167-080-P1-K1-H3
tcggccaatcgttcggccaagcgttcgggctttcaaaggttgtttaagacttggaagggcaacccccccttcaacttatttttttaacccggggttt

SEQ ID NO: 53926 - DNA, 227 bp, Glycine max
  Clone ID: LIB3167-080-P1-K1-H4
gcccaacggttccgccaagcttccgtggtggattgggttgttggttgcgtttatgacccaaatggattattagggtaggattttgtggaaattaacagcctggttcgggcattactgggcccaagaggtccaaatttcagattggacgggggaaaaggaccggctattggcttgggtcctgaaggaggcttggcttttcttaacgaaaaactggtgccaaacttggg

SEQ ID NO: 53927 - DNA, 330 bp, Glycine max
  Clone ID: LIB3167-080-P1-K1-H5
ccaacccgtccgcccactcttccgcccacgcttccggaacgacattgagcttaagcatgggcaagcgcaggggtgggtaaggaactgcccctgttttcgtttgggaggagctttggttccaaccgagtccgattggttttaaacctaaaagggcttaattccaattccaggcccgtcattttgttaaagggagaacattctcgccctgagtttttccagctaaatcctgtgggtggggtccccgttttagtggatgaccacgttgttttttatgactttttcgccatttttttgtttttggaagataagtttcctaacaatcctttgttc

SEQ ID NO: 53928 - DNA, 272 bp, Glycine max
  Clone ID: LIB3167-080-P1-K1-H6
ggatctttttgaacacaaagatcccttaaaatttcaaccatgtccggttacccaaaccagcctccaagttacggttacggttacggggcgccgccgccgcccaatccttacggggctcttaagccccggaattcttacggggggccgccgcccgttaagccatactccgaagggccctacgcccagccgtccgccccctacattaaacctccgaagaacaagtcccactccaccagggggggaagcggggggggttactcggaaccgccggt

SEQ ID NO: 53929 - DNA, 281 bp, Glycine max
  Clone ID: LIB3167-080-P1-K1-H7
ggagggctgtgggaaaaggccttcctggggttttgctcctttgcttgttgttgttccagttcaaaatgggtggtgttgccaccaacgcagggggagattttggggtttggccctggaaaactgttggcggaccaaagggaaaggtctttgaaggtgaaaccacaaccgatttcatttttggccttgggactaacatagtgtgggccgggaccaaggctggatataatggttgtaaaactccaaggggggccaaggtttttaagccagggccggttcaaatc

SEQ ID NO: 53930 - DNA, 200 bp, Glycine max
  Clone ID: LIB3167-080-P1-K1-H9
cccatgcgtccaaccaagttgtggagaacttttaaggggagccaaagggctccctgaaggaggttttcccaagttgttacaactgtcaaccgggccggtgccggattggtggttcaattaacgggcctaaagtccatggttggcttccccccccggaaggatccaccatggccatttccctcccttggttaggcaacggg

SEQ ID NO: 53931 - DNA, 370 bp, Glycine max
  Clone ID: LIB3167-080-P1-K2-A1
gcggcgagcaatggcgacatcgctggtgcgttcgggttttcttcgaagcgccctaagagggggcgctcgtggctcccagggtgcgaagcgaaactttgcttcctctggtcatcacgatgatgcatatgagacggccaaatgggagaagattacatatctaggcattgttagttgcactggtttagccgtttataatctatcaaagggccacccacacttcaaagaacctcctgcttacccatatttgcatatccgcaataaggaattcccctggggtcccgatggactatttgaaacgaagcaccatgaagagcattagtggtttaatgaaggtatttgtggcactggtggggcattcgtttttgtcaat

SEQ ID NO: 53932 - DNA, 420 bp, Glycine max
  Clone ID: LIB3167-080-P1-K2-A10
cccacgcgtccgggctaactcctacagtgtttatggaagtgcattaggtactaaagaagtggatgctacaaggaagaatcttggatggccatacgagcctttccatgtgccagaagatgttaaaaagcattggagtcgccatacccctgagggtgctaaacttgaagctgagtggaatgccaagtttgcagaatatgagaagaaatacagtgaggaagctgcagagctgaaggctattattactggtgaattaccagctggttgggagaaagcacttccgacatacactccagaaagccctgctgatgctacaagaaatctgtctcagcaaaatctaaatgcccttgttaaggttcttcctggtctacttggtggcagtgcagatcttgccttcttcaacatgaccttgttgaaatcata

SEQ ID NO: 53933 - DNA, 99 bp, Glycine max
  Clone ID: LIB3167-080-P1-K2-A11
cggacgcgtgggtgagaattgcttatggtgtatttccttttccaatgaaatgctacagacctttactgcaatgttggagatttattcttcgattgtttg

SEQ ID NO: 53934 - DNA, 276 bp, Glycine max
  Clone ID: LIB3167-080-P1-K2-A12
ggatcattggagaccaatggagcgatctcctttgaggccacagaggcgaaagcagggcctgtaagcttcctaatcccgggtgctacattcagtagttccttcacctctcaacaatctagcttgctcctatctatctatatgtaataagatgcgttcaaataggggcactagcttcactttatgttgtttcagctgtgtgtcaacaagtcatgtaagagacttcactatgttgttttctctttcgtggctttaataaattatgcgcccttgttccat

SEQ ID NO: 53935 - DNA, 108 bp, Glycine max
  Clone ID: LIB3167-080-P1-K2-A2
cccatatatattttatatgatgaaacaaacaatttatgttctctcaaaaaaaaaaaaaaaaatgtgaagtataaaaaaaaaagaagcaaagaaaaaaaaaaacatggc

SEQ ID NO: 53936 - DNA, 278 bp, Glycine max
  unsure at all n locations
  Clone ID: LIB3167-080-P1-K2-A3
attcccgcctagacctacgcctacgctgatacacatcacattctataatattatttatcaatggcacaaaaacctcgcagcggcgggtcaaagtgactgggctcacgaggactaccacnacccaccccccgccccattctacgaccccgccgagctccgaaagtggtccttcttccgcgcacacataaaccactttgttctcaccctcctttaaccatacgtcaccatcctcaccgtcatctgttacaaccaccagacagtcaccatcggcaagccct

SEQ ID NO: 53937 - DNA, 385 bp, Glycine max
  unsure at all n locations
  Clone ID: LIB3167-080-P1-K2-A5
cgctcgtcttctcttattagtcgacggcacactctcttcctttttgcagctcccaccacaacacagcgagtgtctttttaatagggttgggggcgtgaaatcctaaacngaaaagcaacttgagcaaagcagatacctaattccaaaactagcatcgaagcctgtgcaacacctgctagacgccctcgaccttgaatccgtgatatcactccaccaatccggttaccaaactctacacccttccgatgcccctacaccccatctcttagacagtcctctcttccacttgcacaacctttactctttcaaaggcttttttctgaatggcgatcaccatctctctcgccctttttgttttaaacaacattaccattccaattcctct

SEQ ID NO: 53938 - DNA, 399 bp, Glycine max
  Clone ID: LIB3167-080-P1-K2-A6
gttgcattatcacaaacacctcgtccctcactatgtagctagcaatggcggccaacgctgtgcggtcaccgtcgccggtccgacctcagccctttctccggtcatccttctccggcgtctccgtcaagctcactccccaatccataacgctttcacgctccaagcccctcaccgtcttcgccgccaccaagaaggccgtcgccgtcctcaaggggacctccgccgtcgaaggcgtcgccactctcatccaagaagacgatggcccgacgacagtttctgttcgcatcactggccttactccggggcttcatggttttcacctacatgagtatggtgatacgacaaatgggtgtttttctacgggagcacattttaatcctaataaattgacacatggtg

SEQ ID NO: 53939 - DNA, 334 bp, Glycine max
  Clone ID: LIB3167-080-P1-K2-A8
gtgatacacatcacattttctcaaagtaatttattaattaataaataaatggcggcggcggcggcagtgacggtgcgtactgccacctaggattccgaccgccaccaacgttacccgctgctctgctttgccttctctgcctcctcgcggcaccaacactaaaaccactttgctcttatcttccctcaaccacttctcagtgtcccgaaaatcttctctgcttcagaccagagcttcttcagaggaatcatcctcagtagatgccaatgaggtgttcacagatttgaaagaaaagtgggatgctcttgaaaacaagtccacagtacttttttat

SEQ ID NO: 53940 - DNA, 401 bp, Glycine max
  Clone ID: LIB3167-080-P1-K2-A9
caatggcagcctcactacaagctgcagctactttcatgcaacccaccaaggtgggcatgggcactcgcaacctcgagatctgcacaatgcatttctaaggcttttggcttggaacccgctgcagctaaactcatttgctcccttaagcccgatctcaaagattttgctcaaaaatgtgtcgacgccaccaaaattgcaggattcgcccttgccacctcagctctcgttgtttctggagcgagtgcagaaggtgttccaaagaggctaaccttcgacgaaatccagagcaagacatacttggaagtgaagggaactggaactgctaatcagtgcccaaccattgaaggtggagtggactcatttgccttcaaggcagggaaatacaaggcccaaaagttgtg

SEQ ID NO: 53941 - DNA, 303 bp, Glycine max
  unsure at all n locations
  Clone ID: LIB3167-080-P1-K2-B11
gacaatccaacgaattatccttanttacatgagctcatcaaaatcctcaaccaccgggcgtgaatattccgaagaggagcgagcgtcaaaaaaaggcctaaagaggcaactcacccctacactttcaatgctgctatttataatttcatctcaaccttcatcttttttttcaacccccaaatactcataacattttccatattaagcatctttcactatctacttttatcacctcttttttatctaattttttctttaaatcctccataatatttactctctttttttattctataattttta

SEQ ID NO: 53942 - DNA, 407 bp, Glycine max
  unsure at all n locations
  Clone ID: LIB3167-080-P1-K2-B12
cgctaacaangcaccgcctccactaatggctatgtatatcgtgggtgagtcgaggatccgtgacgtcgtttgatggactcagcgaaatcgaggggctttcagtcgcttcttcagcgacaagggtcgcgttctcagcgaggaggaacaggccaaagaaaacgtctacatccagaaatgggagagggagaggttggagaaacagaagcaacaggctgagaagaccaaggcagacaagggcaaagatgctgctgctgataagaaacctgaaggttctcaaatgggctgtgtttatctcttcacactacctggtggggagagttttttttaaataagtatgatggataataatacactttgacccttatataacctttgtatttgtttagattgtgtttttttgtttattt

SEQ ID NO: 53943 - DNA, 233 bp, Glycine max
  Clone ID: LIB3167-080-P1-K2-B2
accgcccacgctttcgtactctatactcttacttttcttttctctgtctaaaggctcccctgggggcacattaaacaatggtgagtgctgtgtccgttcttggcaccattaagggtgtcactacaactatttatttcttttaggacgtaagttgttcgaccatcctatacttttttttttcctcctttttaaattttttttcttgtttttgatgtcctttataataatttttt

SEQ ID NO: 53944 - DNA, 278 bp, Glycine max
  unsure at all n locations
  Clone ID: LIB3167-080-P1-K2-B3
cagaaactcaactcaccaacacagttgcatttttntttttccagatccaactcaaaattgcgatgggtgtataagatacaggtatgtgtatcatcaaggagccagatcatgttgtagtctattcagatggcatttcccatgattcaggtcatgaagctggaagtgatcatcacaatattacagagtcttatgaacaaatcaatgagactactgaacatcatagttcagaggagagtgcaaaggaatatgaggtgaaggaatgttcaacagaaattttt

SEQ ID NO: 53945 - DNA, 423 bp, Glycine max
  Clone ID: LIB3167-080-P1-K2-B4
cagaaactcaactcaccaacacagttgcatttgtttctttccagatccaactcaaaattgcgatgggagtataagatacagagatgtgtatcatcaaggagccagatcatgttgtagtctattcagatggcatttcccatgattcaggtcatgaagctggaagtgatcattacaatattacagagtcttatgaacaaatcaatgagactactgaacatcatagttcagaggagagtgcaaaggaatatgaggtgaaggaatgtacaacagaaatttctgttaaggtctctgatgtctctaatgttaaaagatgtgagtgttagttaaccttatattctgatggttgcctctagttgtaaaagtttttattcttactataatattgtgtaatcttattctataatgatatcttgaagattgttt

SEQ ID NO: 53946 - DNA, 255 bp, Glycine max
  unsure at all n locations
  Clone ID: LIB3167-080-P1-K2-B5
cccacgcgtccggtttcgccttcgatcaaaggtaagatacaaacattcaattcatggcggctgcagagctttaagcttgatngaatgacccacctaancctaaaaccattcacttctgggcacctacctttaagtggggcatcagcattgccaacattgctgatttctttaaaaccacctgagaaactctcctatcctcatcaaatagctgacacagctactttaattattttgtctcattacaacactgttttt

SEQ ID NO: 53947 - DNA, 341 bp, Glycine max
  Clone ID: LIB3167-080-P1-K2-B6
aaccggggcggaccgacgcgtccgcccacgcgtccgcccacgctttctagaaattttctgtttgtttctttgtaaatgatggcgtgcgtggttttgcacgcgagtgggatgacatgcaatttcgatataacttgtccagcattaactgtctttgaggcaaaagaaatcaaaacagaagggtttttattcccagtaactttaaattgggcaaatgatgcggcatgagctttaagagcctgactacgttgttgatccacagagaaaagatgcatgtttccttttaccaattgcggcctcttaggagaaccattatctataccaatcaagactcaccatttttc

SEQ ID NO: 53948 - DNA, 135 bp, Glycine max
  unsure at all n locations
  Clone ID: LIB3167-080-P1-K2-B7
attttgtaataacattaaatgaggcttttttttattgtcgaattgcccaccttaggtgcagtatgtatagagagatgaagatgtacaccatanagcacataacggtggaagtgaacggcataaagattcatgttt

SEQ ID NO: 53949 - DNA, 291 bp, Glycine max
  Clone ID: LIB3167-080-P1-K2-B8
gagaatggaaactatgactggtgtttgctttttatgcccaaaggttttattcaacgcatcagactaaccgcaaaaggcgcatgctctaaagatctgacttacacccagccaagcagtgcgaccgggtagtatcaagtggctgagcgttatgaggattcgtcttgttcttgctgcgcctgagcgcatatcttagatagaggaagatagcatacaacacgctcaggacgcgtgcgcccgctatccgactagcgatcagtgcttcattgggtgtgacgaggtggaggaccttag

SEQ ID NO: 53950 - DNA, 169 bp, Glycine max
  unsure at all n locations
  Clone ID: LIB3167-080-P1-K2-B9
gacaaaccagcgcatcactctctctttctttttcacaacataactctcaaccagcgctggagaanattgcataagggagcggccccaaaaaacccacaattnataaagctaaaaacgtaccaaagaatgcttgtattaataacattgtcacatccaaaataatttaaat

SEQ ID NO: 53951 - DNA, 423 bp, Glycine max
  Clone ID: LIB3167-080-P1-K2-C1
agcgattcttgcttcaagttccagaaatggttgtttctcaaaacattcccgatgcggaggagggaaccttggagattggaatggaatacagaactgtttctggagttgctgggccattggtcattcttgataaagttaagggacccaagtttcaagagattgttaacattcgcttaggagatggtactactcggcgtggacaagtgctagaagttgatggtgaaaaggctgttgttcaggtctttgagggtacatctgggattgacaataaatttacaactgtgcaatttactggagaggtgttaaaaactccagtatcaatttgacatgcttggccgtatatccatatgttcttgaaaaccaattgattatgtttcactccatttacctgtggcttactttggacaattttgaagtttcatt

SEQ ID NO: 53952 - DNA, 429 bp, Glycine max
  Clone ID: LIB3167-080-P1-K2-C11
gcaaacctaaagaaggctgtcttccacacttggtagcagttaattctcaaggatccacgtcttatcactccaagggcactttcatacaaatcagcaatgagagagaatctgttgaggcagggatacagaattgttggaatcattggagaccaatggagcgatctgtttttagaccacataggcgaaagcaggacctttaagcttcctaattccatgtactacattgtgtagtacctttacctttctcaacaatctagctagagtttgctcctatctatatgtaataaggtatgcttggtggcggggggcaaatatgatctttatttatttttttttaatgttatcttcttttttattttgtatttattcttttcttatttttcatttttctacatcctttttatttttctttttttctttcattttttt

SEQ ID NO: 53953 - DNA, 335 bp, Glycine max
  unsure at all n locations
  Clone ID: LIB3167-080-P1-K2-C12
aaaggttgctgtaggagataagattgtttttgngctaagtgctaacacctgcagtgagcgatggcctctgcatgagcggctgtgctcaagtcttcacttgttcttgacaagtctgagtgggtgaagggacaaacccttcgccaaccttctgcatcagttgtgagatgcaaccccaccaccccatcaggcctcaccatcagagctggttcctatgctgatgagctcgttaagaccgcgaaaacagtggcttcaccagggaggggtattttggccatggatgagtccaatgctacctgtgggaagcggggggcttcaattgggctagagaacactga

SEQ ID NO: 53954 - DNA, 261 bp, Glycine max
  unsure at all n locations
  Clone ID: LIB3167-080-P1-K2-C2
aataaaagaaaaagataacggaaatgtctgatgcatatagacccggcgatcaagctcttcggtaagactatcccggtgccgtgtatggtgccannatccaacggagctccggcttcgtcttccggtgacgttgttgttgatgacagtgttgacgcttcttccaccaactctttaagggagtcttataccaacacatatgcacaagagaaagatttttgataaggacacattttgagaaaaaccaactgatgacaagaagga

SEQ ID NO: 53955 - DNA, 398 bp, Glycine max
  Clone ID: LIB3167-080-P1-K2-C3
cccacgcgtacggaagtgaccccaatatacttagttatatctttactcaccaaaacttgggctagggtgagtttgcttcgggcttgtgcaagaaacaagaatatatcaaaagtaggacgcataggtatccattgcatgcagaaactatgtgcagaaaaaatatctcctgattcactagagaaggcccaaaatcgcgtgatagatgctgcactcacacttgttcgagaaaatacaaggcttaagaaagaactcgtgcatagtttgggaggtgctgtggcaacttcaactcttcttggagttcctttgggtcataattcatcgtttcttgaagggcctgcatttgcaccttctttcattagggaaggtatttggtgtggtagcgcaaactccacaacttg

SEQ ID NO: 53956 - DNA, 298 bp, Glycine max
  Clone ID: LIB3167-080-P1-K2-C4
ggttcatcgtcccactttcttctccttttagggtttcctttcagtgtctcctttccagagcgtggtcttccatttttgaggattaggcggtgagattcgtgaatctgagaaatgtcggattcttctcgggaggagaatgttcacatggcgaaattggcggagcacgcctagcgttacgaggagatggttgagttcatggagaaggtagcaaagactgtggaggctgaggagttgacggtggaggacagaaatacttctctctgtggcttacaagaacgtgttcgttactatgagagct

SEQ ID NO: 53957 - DNA, 479 bp, Glycine max
  unsure at all n locations
  Clone ID: LIB3167-080-P1-K2-C6
ccgaaaaccgggcggccgacgcgnccgaccaaacaagaatcaagatagagaggtgnnactacgttagtctatgaacagtcaccccnnaggtgcttaaatttccagacccgcaggatcaaactcttctattctctcatcaatcaatcaatccagttccctctcggataggaatgggaatatatctcagcactccaaaaactgaaaagttttctgaagatggcgaaaatgactgccttagatatggtttatcatcctatcaatggttgcgtgcaacaattcaaaaattattatgcttccatatacctactcttcattaattcccctttcactttcggtgggggggtggtgggatctttttttatcttctttatttctcctctctatcttcttacccttatcttatcttttctttacttctttttattttccttctcttcttccttcttcatctttacctttatacattcttttttcttact

SEQ ID NO: 53958 - DNA, 169 bp, Glycine max
  unsure at all n locations
  Clone ID: LIB3167-080-P1-K2-C8
acgaccacccaagccctatacatccaattttttttatacacccannnganncannnggggngggtttccttaaaaaggcggtcggggcaaaaaaaaaaattaatttttatttatttcttctttttttttttttcttcttcttcacttttttttttttccaatttttttt

SEQ ID NO: 53959 - DNA, 273 bp, Glycine max
  Clone ID: LIB3167-080-P1-K2-C9
gacattccagcgagtgatcggtgttcactttatctcatcataaccgtcagccacagggggagaatatgccgagcaggggcggggcccccacaaggcctgaagaggcaactcaccccgacacgtagaaggcagctatggctgagatcatctcaaccttcatcatcgtgttcgacgactcaggctccggcatcacccacaacaagctcaccgacaacggacctgacacccctgccggccacatatccgtctacatacgcccatgcaaacgcccct

SEQ ID NO: 53960 - DNA, 84 bp, Glycine max
  Clone ID: LIB3167-080-P1-K2-D1
gtagtccgtattttcactatagaagtagatgtctcaaatttattggttaccccgttccaagaggggaaaaaaaaaaagaggggg

SEQ ID NO: 53961 - DNA, 356 bp, Glycine max
  Clone ID: LIB3167-080-P1-K2-D11
ggcctacaatgaactttggcccatgagttatcaaaaacaattttttttaagaaaacgaggtcgtttgggcttggaggtggatactcactctcctgttaccttatttactgcatcgcttctcgtcgaagtgggcttcatttcataggcggcgttgaaggggaataagatgcctcttacattgtatgtttccgttaagccacatattaggaggagccggatggatttagttgtaagggtgggaaaacatgtgtcagaagaaatggggttgcattgttaagagcttggagagttcgtgggctttgtgtgaaaaagctataggagattatcaggcctgctgtcaatgagctgtgctacac

SEQ ID NO: 53962 - DNA, 207 bp, Glycine max
  Clone ID: LIB3167-080-P1-K2-D12
cccacgcgtccgcccacgcgtccgaatttaacttttggggtatattggaggtggagaatgttaagtagagaaagagagtgacttccttaggggatgattaaacctctgatggcattgttaaaccgtaaagaccaatgttagtcgacaaaattgtatgcaaattgtaatgtacgttacaatcaagtgtgtgtattatcaatttatgtt

SEQ ID NO: 53963 - DNA, 415 bp, Glycine max
  Clone ID: LIB3167-080-P1-K2-D2
gagagagagagagagagatagagacacattttttgtgctcctatggagaacagagctctggtgacggtgccactactcgtcggagtgtcgaccaattcggttccttccgcccttgctatctggctgacgttacccaccactggcactaagtgcgtctccgatgaaatccaacacaacgtcgtcgttttggccgactacgtcgttatccccagtgatcacgcccacaacctcaccatcgccgtcaaggtgacatcaccgtatggaaacaatcttcatcacaaggagaacacaacacatggtagtattgcatttacaactcaagaggctgggaactaccttgcatgcttctgggtggatagccctagtcaaggagttggtgaggttaatgtaaaccttgattggaaaattgggattg

SEQ ID NO: 53964 - DNA, 405 bp, Glycine max
  Clone ID: LIB3167-080-P1-K2-D3
agaaaaacaagtagttgagaactaagaagattgaattggcttcctcaatgatctcctcccgagctggtaccaccgtcaaccgtgccggtgccggcatggttgctccattcaccggcctcaaatccatggctggcttccccacgaggaagaccaacaatgacattacctccattgctagcaacggtggaagagtacaatgcatgcaggtgtggccaccaattggcaagaagaagttcgagactctttcctacttgccagacctcgatgatgcccaattggcaaaggaagtcgaataccttctaaggaaaggatggattccttgcttggaattcgagttggagcacggtttcttgtaccgtgagcacaacaggtcacctggattctatgatggacgctactggacca

SEQ ID NO: 53965 - DNA, 405 bp, Glycine max
  Clone ID: LIB3167-080-P1-K2-D4
agcaagcataattgttggagctccaaaccatactgtactactctctagctccgtccacgtgccgtggtacgctctgaaatcttccgtcgtctctggcatctccgctgccagccttctgatctgtcataccaaatggccaacagggttcaaattcctaccaacaattcagcactcattgctatgattgcagatgaggatactgtagttggatttttgttggctggagtgggaaatgttgacatacgtaggaagacaaattacctcattgtggattcaaaaacaaccgtcaaacaaattgaggatgcattcaaagaatttacaacaagggaggatgttgcaattgtgctgattagccaatatgttgcaaatatgataagggttttggttgataggtataacaagccc

SEQ ID NO: 53966 - DNA, 378 bp, Glycine max
  Clone ID: LIB3167-080-P1-K2-D5
ggcttaggcattgataatccgatgcaaggtgttatttaatgagttaccaaattatgaaaggtctggggtttcccgatattcagatggacggccaacaagtgcacctcatcactctggtggggttcagctggctcgaaatgatggaaaaattgttgggtctgatttgcagcaccctatgccttctgaactaactgagcgacctaaactgaagttgctaccaagggcaaagccagtggaaagttcagaacctgctgtcatggattatgcacagggtaatcgtcaggttaatgattctggccatgttgaaaccgtttatcaagcacatggccatgctaattttgtgaagcctgtatcagctggaaatgacaatgggaaaga

SEQ ID NO: 53967 - DNA, 371 bp, Glycine max
  unsure at all n locations
  Clone ID: LIB3167-080-P1-K2-D8
acggaancccggtcgaccgcacgctccgcttcccttctccaacatgccaaacatcggttctggtctttcttcttcgtacgctgttacatgcctcggtgggcgattccacgataccatattttcctaccgagtcaactcatgacagactcagtgagttgcactgctaccgactaaaccttaactacaagccgtgatcggaatcctgactcaccccggcgacggtccttttgcctgttagcaacgccaccggggttttatcattttcttttcttatctatatcttatatttttcttttattaattgtgtggtggggggggggttttaaatttttttttttttaatactttttatttttttttcttcttaatat

SEQ ID NO: 53968 - DNA, 131 bp, Glycine max
  unsure at all n locations
  Clone ID: LIB3167-080-P1-K2-E1
ccacgcgtccgccacgcgtccgcccacgcttccggttgagtgtataggccgttgattgtangtgctttcgtttttttaagagctgagggtcgggctaaaagaatgnttttttaagtacaacatcgtgggag

SEQ ID NO: 53969 - DNA, 188 bp, Glycine max
  unsure at all n locations
  Clone ID: LIB3167-080-P1-K2-E10
cggaaaccgggtggaccgcacgcgtccgaaactctccagccttacagtatgtgtgttttacccagatgaagnnngccctggggggggggttttttaaaggggggggggggcaaacaaaacttaaatttatatatataattttttattatataatttttttattaattttttttcaaaaattttttttt

SEQ ID NO: 53970 - DNA, 152 bp, Glycine max
  unsure at all n locations
  Clone ID: LIB3167-080-P1-K2-E11
ctcccctgcttcagcggttatgcctttttatttcttccgatcttatttcacattngattgtctcatttaaaaagcagggccgtcaataaaaaaaaacaatttacttatcttatcacaattatatcttcattttactcatcaaatttctatct

SEQ ID NO: 53971 - DNA, 89 bp, Glycine max
  Clone ID: LIB3167-080-P1-K2-E12
aaaactgtggacaattaaacgttctatatgtaagtgacttttttcttaaaaaaaagggaggtataataaaaaaaggaaggggggaaaaa

SEQ ID NO: 53972 - DNA, 426 bp, Glycine max
  Clone ID: LIB3167-080-P1-K2-E2
gcagcttccacatcactatgcttttcaccatccacatactccaccagaattgttgttctcagaagaatctcaaattcaacactggcattgaacaatggtcactctttcttactcttatcagctaaacctatgcatttctcttcacacaagagcagtagaagacaaccccatttccttgcacaagctgctgcatcttctgcagtaaatgctgaatacgtggaggaaccagcaacaaatgtgaaattccagacatctttgagttttcccggttgctcaaattcattaactttgtttggaacaggatacagagaaaaagtttttgcgattattggtgtcaaggtctatgctgcaggtttgtatctagatcaatctatcgcccttgaattgaatgcttggaaagggcaatcaaaagaagctattcaaggg

SEQ ID NO: 53973 - DNA, 165 bp, Glycine max
  Clone ID: LIB3167-080-P1-K2-E3
atccaattgaaattttaaaaatgactgggattatacttaagaattcaattattgaaattgaataagtaaacaatttaattggattggtcgaatggtatcaaaaaaatggagtactaactcccatttcttatttattattgaattaaccgatcaacttgctttgtt

SEQ ID NO: 53974 - DNA, 351 bp, Glycine max
  Clone ID: LIB3167-080-P1-K2-E5
gaggaaaggaagggagtagggagtgagtaattttttaaataaagaggaaagcttgaagcagaaggtagagatgtcatgatcggcaggcctggacaggcaaatagagcagttgaagaggtgtgagcctcttaaggagtctgaagtgaatgtgctctgcctcaaagccatttaaatcctcgtcgaagagagcaacgttcaaagggtcgacgctcctgtcaccatatgtggtgatattcacggtcagttttatgacatgaaggagcttttcaaagtaggaggggattgccccaaaactaactatttattggtgggggattttgtttatatatcttttttactttttttgaaacg

SEQ ID NO: 53975 - DNA, 250 bp, Glycine max
  Clone ID: LIB3167-080-P1-K2-E8
cccacgcgtccgcttttcagttctcttctcttctctgcgcgacacagcacttcgggactgggcctttttttccattctgatagcgtttttgtgttttcaagcaagcgagtacggaactcatctgttgataaactgctacctcaagcagtgacaagaaaagtggtggaagtttgattgacttcattgttcatatttgtctgaatactccttataaaaataggttttacatttgttgctttcacttgatgaa

SEQ ID NO: 53976 - DNA, 87 bp, Glycine max
  unsure at all n locations
  Clone ID: LIB3167-080-P1-K2-E9
agaggcgactccaggtttgtcggcgatgcttttagcgggaggcaggcggctcctcgcccgggggctccgnagggtgggcggggccac

SEQ ID NO: 53977 - DNA, 333 bp, Glycine max
  Clone ID: LIB3167-080-P1-K2-F11
cccacgcgtccgcttcactacaacctttttttccatagataacatctgcatcagacaatggacaaacatgtattgcggaacgtgcacaccactttcttcttcttcttattctcatcacaccactctaaagccaaacctcaaccctcttctgggtgcagatgcaacttctaggccatgttctctacccttgaaaagaagaacatgctttactaccaaagccattctctcatccaccagagaagatgtcttgaagcatttcaacgaacgactagctctcaagaatatctcatgcttgcagaatttcaataaagacaatttttccctctttgtcac

SEQ ID NO: 53978 - DNA, 422 bp, Glycine max
  unsure at all n locations
  Clone ID: LIB3167-080-P1-K2-F12
cccacgcgtccgaatatagcccaagccctattcaaccaaaccctaacacacacccatttggttcagtttccatggctagcctcaaggttgcatttttggctgcagtgctctgcatggttgtggtgagtgcacccatggcacatgcagctatcacgtgcgggcaggtgacgagtagcctggccaattgcatcggttacctccagaagggaggaacgccgtcgtcgggatgctgcaacggagtgaagagcctcaatgccgccgccaagaccaccgccgaccgccagacggcgtgcaactgcctcaagtcggccgccagccaaatcttcggcttcaacgccaacaacgccgcctcgctccccggcaaatgcggagtctccatcccctacaagatcagcacctncaccaactgcgctaccatcaag

SEQ ID NO: 53979 - DNA, 380 bp, Glycine max
  Clone ID: LIB3167-080-P1-K2-F2
cccacgcgtccgcccacgcgtccgcccacgcgtccgcagcatctgggtttgtgctgtctcggagggttgcagcttccaccacggactcaagggtggtcttgttcaacacaaagaaccacgcttctaggcttcttgtgagggcttcagacgagcctgcagcggcggcacccgcaaccaccacccctccagctgaagctgaagcaaagccaaaaccaccacctattggccccaagagaggtgctaaggtgaagattcttaggaaggaatcctactggtacaaaggcactggttcagtggttgctgttgatcaggaccccaacactcgctacccttgtgtggttcgattcaacaaagtcaactatgccaatgtatcaacaaac

SEQ ID NO: 53980 - DNA, 168 bp, Glycine max
  Clone ID: LIB3167-080-P1-K2-F3
ggttgaagttttcatacacatatatcctgttatgtcacatgcttctcatcagcgagatagtttgagtgtttacatgaaccagatcagtattgtacctgctgaggatagtaacatctaatgaattgtatctgatatcatcttatcaaacttttcacagatgtcagtttt

SEQ ID NO: 53981 - DNA, 420 bp, Glycine max
  Clone ID: LIB3167-080-P1-K2-F4
gatcgagcaagcatgcgtaaacactagctttatttctgctcaacatgattacactatgacggaggcccaagtgaagcacgcgctcgtaaacaaatttatgggactacctgaatccagaggacaggtagcccagcttatgagagcaatgcctggacgatcagagccgacacatgatgaggaatgtgaaagggcaccggcgacaaggagaaaaatgacgctcctctactgtgaaaacagagcacgaaaaaggccctaggcagtgtgaagcatgtgctcatgcaatacaaacacaacaccgcgagattcaaggagtataatcagagtagacagacttcaaaaatgatcacgccatatctaatggtgtgactgacccatcaaagctagctgattatgtgtacaaactgaccaagatgcgagctt

SEQ ID NO: 53982 - DNA, 404 bp, Glycine max
  Clone ID: LIB3167-080-P1-K2-F5
cccacagtgatttgagagagaaaataatacttcaattatatcgtcaaaatgcctgtgagaggccgtcgtgatagcccaatggggagaattcctgatccaaatcgcaagacaggtccagatgacgcggttataatgcagaaaataatgggaaaattgagagaagcagatagcaacaacgacggtcgttacgacaaagatgagctgaagcatgctctcaagggtttaggtgccatcctccctgggtggagagccaaccgttgttttggaagggttgatgccaaccacgacggtgagattagtggcgctgaaattgaagctctccttcaatatctccgttcttatgggtatggaaaataatcatcacttatctgtgtgttgtctaattattatagtcttcaagaaat

SEQ ID NO: 53983 - DNA, 74 bp, Glycine max
  unsure at all n locations
  Clone ID: LIB3167-080-P1-K2-F6
ccacgcgtccgtgaattttataagaagacttttagtgaatncttataaccacttgcacatactcacttcactac

SEQ ID NO: 53984 - DNA, 371 bp, Glycine max
  Clone ID: LIB3167-080-P1-K2-F8
cgccgctttgtgctgctgttgcaaaacttattgttgagcctttttttgaggttttcagggcttctttctcaaagggggcgttaaaaataaatttaatttcttaatccttcacctgagttggagaaaagaaaacacaaactcaagcgtcttgttcagtcaccaaactctttcttcatggatgttaagtgccaaggatgcttcaacataacaactgtgtttagccactctcaaactgttgtggtgtgcggaaactgccagactgttttgtgccaaccaacatgtggactgtcgaggttaaccgaaggttgctcatttaagaagaaaggagattgaatggtttgttaaccagacttttctttgtcaatgatttg

SEQ ID NO: 53985 - DNA, 438 bp, Glycine max
  Clone ID: LIB3167-080-P1-K2-F9
atttcagtgagtgatcggtgttcacttgatttcatcataatcgtcagcgtcaattgaaggagatgcctatcagaaacatggccgtcggaaggcctgaagaggcgactcaccccgacacgttgaaggcggctttggctgagttcatctcaaccttcatcttcgtgttcgccggctcaggctccggcatcgcctacaacaagctcaccgacaacggcgctgccacccctgccggccttatctccgccttcatcgtccatgcattcgccctcttcgtcgccgtcttcttttatccctacagggggggtgggttactttatcttcttctttcttctttttcttttcttattttttttttatattttttttttttttgtattgattattattttttttattattatattaattaattaattttttaatgttttatttttattt

SEQ ID NO: 53986 - DNA, 326 bp, Glycine max
  Clone ID: LIB3167-080-P1-K2-G1
tagttctagatcgctatgggccagctaaaatgccttacactctgctctatccttctagtgaggagggattgactttcagaggaattcccaacagtatctctatctaaggaccctatggttgcttaagtactggtcctggttttaaaataaatgtgaaattgaaggaaccagattccttaatcagttgtgtatgcttaagtcatgtatttggagtggctgaatgtatttgtatttgtcattaataaagagagttgtgttagtataaaaaaaaaaacattatatttaaaatgataaaagaaatgcaaatgactatggaaaatagaacc

SEQ ID NO: 53987 - DNA, 279 bp, Glycine max
  Clone ID: LIB3167-080-P1-K2-G10
gattcccgggcaggccggctgcatgagaacaactcagtcctaaaagcgcatctttgtttggtaatccccgatgaaagacttgaggagtagctatttatagggggggggggcacaacacctccctatctgtaactccatcctctcatatcttgctgcattgagcaagaaacggtttgattcaaagttcaatggctagctgaactataacctcaagaagcatgctaacaatcaagatccatttccctgcaattactcccttaagggggggacttgcacctg

SEQ ID NO: 53988 - DNA, 372 bp, Glycine max
  Clone ID: LIB3167-080-P1-K2-G12
gttttggcagtgccattggttttgtctcatgttcttttcaagaagcctaaggcttggggtgttgagtctgccaagaatgcgtatgcaaaacttggtgctgatgggaatgctcagttgcttgatataagggcactggtggagattaggcaaggggggtccccagatgttgggggtctgaagaagaaagcagtgtcaataccttataagggtgatgataagccagggttcttgaagaagcttgctttgtagtttaaggagccagagaataccacattgtgtattctcgacaaattacatgggaactctgaactgacagcagagttggttaccgttaatgggtttaaagcagcttatgcaattaatgatggtgca

SEQ ID NO: 53989 - DNA, 185 bp, Glycine max
  unsure at all n locations
  Clone ID: LIB3167-080-P1-K2-G2
cggggcggaccgacgcgtccggccattatgatcaagaaagtcaggggtcttttatttagttgcatttcacacaaaaaaggggcgacatatgttgcagttattgggtggttcacatctnnccactgcagttgacacattctttccaatgctcgaatcaggttgtatgtactttggtagctgttttt

SEQ ID NO: 53990 - DNA, 426 bp, Glycine max
  Clone ID: LIB3167-080-P1-K2-G4
tatagaaaccctaatttgttacacctagcttcttccttcattttctcatcatcaatattcaacaacatggctaatttgcaaggagggcctgactttgacaaaatctttcacttcctctccatttgcatccttgctttcatcaatgaaggctcttcctccctctcaagtgcattcatgaatgaaccatggtcatggggcctaagcattcccataagtttgtacgtgaaattcgcacttgagattcacactcaccttggaatctgcgttggggttggagtaccctctttggtctattggggtgccacacgtggtgccattgattggtactgggaagcagcattgaagttcaaccacgagatcttcaagacatgcttgttcaatgttgtgattgggttgctacacttgttggtgtcaaagcttgctcat

SEQ ID NO: 53991 - DNA, 399 bp, Glycine max
  Clone ID: LIB3167-080-P1-K2-G5
cccacgcgtccgcatccatagacatggccaccgtcacttctgcagccgttgctattccctcattgactggcctcaaggcaagcgcaggcaaagtgagtgccgcagttaaagtctcagctccccaagccacaaggttgggcatcaaggcttcgctgaaagacgttggagtcgctgttgtggccactgccgcgagtgcagtgctggctagcaacgccatggccattgaagtgttgctgggtggtgatgacgggtctctggctttcgttcccaacaatttctccgtggcctctggggagaagatcgtgttcaagaacaacgcatgtttcccccacaacgttgtgttcgacgaggacgagattcctagcggcgtggatgcagggaaaatcttcatgagcgatg

SEQ ID NO: 53992 - DNA, 439 bp, Glycine max
  unsure at all n locations
  Clone ID: LIB3167-080-P1-K2-G6
cggaatnncccgggntcgaccccacgccgnntccgcccacgccgttctcgattcaattcnatgaggcaaccaatatggtatgttgtaaatnnntaagagcannntggctgcagcgaagcggtcttgtattcaatcagtcagtgctctgtaccctntnnctcagcnncgaggctttaccaagacanannagtctttggacccannagatcacntnnccaatctcnnncatttggnncttctcaagggaaaagggcctcctttcttggttaaagggcagctgcnttactccccctgtcaaagcaaggggatcagacccagacctttnnngtggtttggcattcaaagcannaagtctttctctaccttgngnnatggcagcnncttccgggtggacctatnnggatttgaccnnnctctgggaccctttcggaccccctga

SEQ ID NO: 53993 - DNA, 314 bp, Glycine max
  Clone ID: LIB3167-080-P1-K2-G8
gaactctccaggccttacagtatgtgcaggttaacccagatgaagtttgccctgctgggtggaagcctggggagaagggcatgaaaccagaccctaaacttagcaaagactactttgcagcggtgtagctaggataatagttaagagtggctatctgcatctgtatcaatcagtgaattgcaaaagggtcttgttttttttaatgttttgtaagtccttaaattttgagccgcagggtttggtaatatgcgtgctggtgtactggattttgaagtgtactatgtattaatttgcaatttctgttcattatgatc

SEQ ID NO: 53994 - DNA, 350 bp, Glycine max
  unsure at all n locations
  Clone ID: LIB3167-080-P1-K2-G9
cccacgcgtccgtcggaagctgaaagattgtttaatgaaatgattgagtctggctgggagggtactattaaagggggggggggcaaaaaaaannctattnnaaggttttttcttttatcattattattatttcttattatctttttttatttttttttttttttttatttttttttatttatttcttattttttttttcttcattcttttttttattttttactttattcagctttcatcttttttatttcttatttttttttttttatttatgtgggtgggggggggtttttttttttttatttttttttattttcttttttattatttattttttttttttctctttt

SEQ ID NO: 53995 - DNA, 444 bp, Glycine max
  Clone ID: LIB3167-080-P1-K2-H1
cccacgcgtccggcctgatatttgtaaaggtaggtgcaactatgtgtcttaagcaacttagggtgcatacaaactcaaaagatggtggttaatctcacaggtgtttggatgtcgatatagatggtctgctttacccccttattgacaacttgtgtttcatacttcttttaagaattgcccattatatctcataattgactatatgcatcgccgctcaggatgttttatattttctttacactttacagtttatccaaagttttttattgtagttactttatttttttttccttttcaatttccagaactggttttttttttcatttattttttttcactttcttgtttttgtattgtttattttccatttaatcgttctctttggattttaataaatttagtgttttattatttttttattattattttattttttatttttat

SEQ ID NO: 53996 - DNA, 298 bp, Glycine max
  Clone ID: LIB3167-080-P1-K2-H10
acgggagccctgggctgtgttttccccgttctcttgtcccgcaacggtgtcaagttcggtgaagccatatggttcaaggccgggtctcaaatattcaatgagggtgggcttgactacttgggcatcccaagcctgatccatgcacaaagcattcttgccatctgggccacccaagttatattgatgggtgccgatgagggttaccgaattgctggcgggcctgttggtgaggtgactgacccaatctatgcaggtaggagtttttacccattgcgccttgcttgtgacataaaggctt

SEQ ID NO: 53997 - DNA, 384 bp, Glycine max
  Clone ID: LIB3167-080-P1-K2-H11
cccggcccgacggacgcgtacgcaaatacctaatatggagtttcacatttttttcatcattacttttctcatgcttggtggggcaactaatgctgaggcggcggtacctcctacattttactggaagtccaagcttcctaccacaccaatgccgaaagccatcactgatttgctacaacctgattggaaggaagagaaagacacctctgcggatgtatggaaaggtagagtaaatgttgtgttcctccactaatcgatgaccacgctgttttctatgactctttcgccattattatgtattcttaagataatattcttacaatcctttgttttctcattattttacaagacagcaattaattttcaggctgctttttgtttttt

SEQ ID NO: 53998 - DNA, 105 bp, Glycine max
  Clone ID: LIB3167-080-P1-K2-H2
gtccgcccaagcaaaaagaaagaatcccaggcgatgagtaaagatggaggggaaggagcaggatgtggcggttttttctaacaagttgcgcgatagacaaccaat

SEQ ID NO: 53999 - DNA, 425 bp, Glycine max
  Clone ID: LIB3167-080-P1-K2-H3
cccacgcgtccgcccacgcgtccgggcatacaaagctgcatcacgactagcaagtgcaacaccacgtccagctcatgttctgagccgtggtattggttggcaaggaattggaatcttgctgaatggcctttttggaacactaaccggttcaacagtttctgtagagaatgtagggcttctaggaagcactcgtgttgggagtcgaagggtcattcaaatttcagctggctttatgatattcttctcaatgttaggaaaatttggagctttatttgcatcaataccattccccatttttgcagctgtatactgtgttctgtttggccttgtggcttctgtggggctatcattcttgcagttcactaacatgaactcaatgaggaacctctttattggtggtgttgcccttttcttaggtttttctg

SEQ ID NO: 54000 - DNA, 370 bp, Glycine max
  Clone ID: LIB3167-080-P1-K2-H4
cccacgcgtccgttgttgaattggttggttgttgcgttcaagaacctaatcgcatattagtgtatgaatatgtggaaaataacaggcttgatcgtgcattactaggcccaagaagttcaaatatcagattagactggagaaaaagatctgctatttgcatgggtactgcaagaggtcttgcatttcttcacgaagaacttgtgccacacattgtgcacagagacatcaaggcaagcaacatactacttgacagagacttcaaaccaaaaataggagattttgggttggctaaattgtttgcagacgacatcactgacattagcacaaggattgctggaacaactggttacttagcaccggaatatgcaat

SEQ ID NO: 54001 - DNA, 491 bp, Glycine max
  unsure at all n locations
  Clone ID: LIB3167-080-P1-K2-H5
ccggaanaggccggtcccgaccccagcgcgtaccgcccaacgcgtcttcgctcacgtcgtctcggtcacgactatctgtagtcatcagcannatggcaagcgcaaggtgtgtggtgaaaagaactgacagctgtgattggcgtgattggagganngctcttgttcccaaaccgagtccgaatncgctctcaancctcaaagggncttaaatacgaatacanagcccgtcaattctgctcaagggnagaacccaatctcgccctgagtnttctccagctttcaatcctgttggttggtgtccccgttctttagtggatgaccacgttgttctnctatganctctttcgccattattatgtatttggaagataagtatcctcacaatcctttgctccctcatgatatttacaagagagcaatcaatttccaggctgctagtgttgtttcctcaacaatacaacctcttcataacttgagtttactgaactaca

SEQ ID NO: 54002 - DNA, 318 bp, Glycine max
  unsure at all n locations
  Clone ID: LIB3167-080-P1-K2-H6
cgaattgaagtcccggcccgcgcgacccgtacgtttttgcacacaaagatccattcaaaatttttctcatgatcggctaccccaaccagcctacgagctactgctacggttacggggcgccancttccncccatgcgtacggggcttcttagcccccgcaatcctacggcgcgccgcacgccgctcagccatacttcgcagcgccctacgcccagccgtcccgcccctacaataaacctccgaagaacgagtcccactcccacagcggcggaagcggcggtggctactcggcaccgccggctactgcgtacgcgagcc

SEQ ID NO: 54003 - DNA, 319 bp, Glycine max
  unsure at all n locations
  Clone ID: LIB3167-080-P1-K2-H7
gggaggctcngggaaaactacgngcattttttttactactatacctcttactgcaccggggtcatcataggagagctgggaggaacacaaaaagaaaatctaagagttggaccaggaacactgaatcctcaccccaaaaaaaactcttttgaacctgaaacacaccccactttaattatagccctgggactcacaaagatgtggccgtgaacaaggctggatatgatagctgtaagactccaagaggagccaaagtgtttaagtcaagcacggatcaaatcaatctttccaaggtacagaactacgtgatttacaaata

SEQ ID NO: 54004 - DNA, 368 bp, Glycine max
  Clone ID: LIB3167-080-P1-K2-H8
tctctctagggtttgatcagactcaagggtttaagccatgggaaaaaggaaggcaaaggcaaagcctcctccaaagaagcgagtggataagctcgataccgtcttcagctgccctttctgcaatcatggcagcagcgtcgaatgccgccttgacatgaagaacttgataggggaagctatttgcgggatatgccaagagagctttagcactaccatcacagctttatcagagccaatagacatatacagtgagtggattgatgaatgtgaactggtaaaccacccggacgatgatggtgctgagcactgatgctcaaattcctgttcttgtggttgtgaacggattaactggcccaatttatatcttc

SEQ ID NO: 54005 - DNA, 216 bp, Glycine max
  unsure at all n locations
  Clone ID: LIB3167-080-P1-K2-H9
cccacgcgtccgaacaagtagttgataacttttaaggagaagcaaatggcttcctcgatggtgtctttcccaggtgttaccgctgtcaaccttnccnntncctncatggttgctccattcactggcctcaagtccatggctggcttccccaccagaaagaccaacaatgacattacctccattgctagcaaccgtggaagagtgcaatgcatgcat
